United States Patent Application Publication US 2023/0192864 A1 - sequence listing, part 4

SEQ ID NO: 66672 - RNA, 19 nt, synthetic construct
  misc_feature 1..19: note = siRNA sense sequence
  source 1..19: mol_type = other RNA
cattgtttcatccagataa

SEQ ID NO: 66673 - RNA, 19 nt, synthetic construct
  misc_feature 1..19: note = siRNA antisense sequence
  source 1..19: mol_type = other RNA
ttatctggatgaaacaatg

SEQ ID NO: 66674 - RNA, 19 nt, synthetic construct
  misc_feature 1..19: note = siRNA sense sequence
  source 1..19: mol_type = other RNA
tgtgttgatacattctgac

SEQ ID NO: 66675 - RNA, 19 nt, synthetic construct
  misc_feature 1..19: note = siRNA antisense sequence
  source 1..19: mol_type = other RNA
gtcagaatgtatcaacaca

SEQ ID NO: 66676 - RNA, 19 nt, synthetic construct
  misc_feature 1..19: note = siRNA sense sequence
  source 1..19: mol_type = other RNA
gtgttgatacattctgaca

SEQ ID NO: 66677 - RNA, 19 nt, synthetic construct
  misc_feature 1..19: note = siRNA antisense sequence
  source 1..19: mol_type = other RNA
tgtcagaatgtatcaacac

SEQ ID NO: 66678 - RNA, 19 nt, synthetic construct
  misc_feature 1..19: note = siRNA sense sequence
  source 1..19: mol_type = other RNA
gttgatacattctgacagc

SEQ ID NO: 66679 - RNA, 19 nt, synthetic construct
  misc_feature 1..19: note = siRNA antisense sequence
  source 1..19: mol_type = other RNA
gctgtcagaatgtatcaac

SEQ ID NO: 66680 - RNA, 19 nt, synthetic construct
  misc_feature 1..19: note = siRNA sense sequence
  source 1..19: mol_type = other RNA
ttgatacattctgacagct

SEQ ID NO: 66681 - RNA, 19 nt, synthetic construct
  misc_feature 1..19: note = siRNA antisense sequence
  source 1..19: mol_type = other RNA
agctgtcagaatgtatcaa

SEQ ID NO: 66682 - RNA, 19 nt, synthetic construct
  misc_feature 1..19: note = siRNA sense sequence
  source 1..19: mol_type = other RNA
tgatacattctgacagctt

SEQ ID NO: 66683 - RNA, 19 nt, synthetic construct
  misc_feature 1..19: note = siRNA antisense sequence
  source 1..19: mol_type = other RNA
aagctgtcagaatgtatca

SEQ ID NO: 66684 - RNA, 19 nt, synthetic construct
  misc_feature 1..19: note = siRNA sense sequence
  source 1..19: mol_type = other RNA
gatacattctgacagcttc

SEQ ID NO: 66685 - RNA, 19 nt, synthetic construct
  misc_feature 1..19: note = siRNA antisense sequence
  source 1..19: mol_type = other RNA
gaagctgtcagaatgtatc

SEQ ID NO: 66686 - RNA, 19 nt, synthetic construct
  misc_feature 1..19: note = siRNA sense sequence
  source 1..19: mol_type = other RNA
atacattctgacagcttct

SEQ ID NO: 66687 - RNA, 19 nt, synthetic construct
  misc_feature 1..19: note = siRNA antisense sequence
  source 1..19: mol_type = other RNA
agaagctgtcagaatgtat

SEQ ID NO: 66688 - RNA, 19 nt, synthetic construct
  misc_feature 1..19: note = siRNA sense sequence
  source 1..19: mol_type = other RNA
tacattctgacagcttctt

SEQ ID NO: 66689 - RNA, 19 nt, synthetic construct
  misc_feature 1..19: note = siRNA antisense sequence
  source 1..19: mol_type = other RNA
aagaagctgtcagaatgta

SEQ ID NO: 66690 - RNA, 19 nt, synthetic construct
  misc_feature 1..19: note = siRNA sense sequence
  source 1..19: mol_type = other RNA
acattctgacagcttctta

SEQ ID NO: 66691 - RNA, 19 nt, synthetic construct
  misc_feature 1..19: note = siRNA antisense sequence
  source 1..19: mol_type = other RNA
taagaagctgtcagaatgt

SEQ ID NO: 66692 - RNA, 19 nt, synthetic construct
  misc_feature 1..19: note = siRNA sense sequence
  source 1..19: mol_type = other RNA
ttctgacagcttcttaggt

SEQ ID NO: 66693 - RNA, 19 nt, synthetic construct
  misc_feature 1..19: note = siRNA antisense sequence
  source 1..19: mol_type = other RNA
acctaagaagctgtcagaa

SEQ ID NO: 66694 - RNA, 19 nt, synthetic construct
  misc_feature 1..19: note = siRNA sense sequence
  source 1..19: mol_type = other RNA
tctgacagcttcttaggtt

SEQ ID NO: 66695 - RNA, 19 nt, synthetic construct
  misc_feature 1..19: note = siRNA antisense sequence
  source 1..19: mol_type = other RNA
aacctaagaagctgtcaga

SEQ ID NO: 66696 - RNA, 19 nt, synthetic construct
  misc_feature 1..19: note = siRNA sense sequence
  source 1..19: mol_type = other RNA
ctgacagcttcttaggtta

SEQ ID NO: 66697 - RNA, 19 nt, synthetic construct
  misc_feature 1..19: note = siRNA antisense sequence
  source 1..19: mol_type = other RNA
taacctaagaagctgtcag

SEQ ID NO: 66698 - RNA, 19 nt, synthetic construct
  misc_feature 1..19: note = siRNA sense sequence
  source 1..19: mol_type = other RNA
gacagcttcttaggttatt

SEQ ID NO: 66699 - RNA, 19 nt, synthetic construct
  misc_feature 1..19: note = siRNA antisense sequence
  source 1..19: mol_type = other RNA
aataacctaagaagctgtc

SEQ ID NO: 66700 - RNA, 19 nt, synthetic construct
  misc_feature 1..19: note = siRNA sense sequence
  source 1..19: mol_type = other RNA
acagcttcttaggttatta

SEQ ID NO: 66701 - RNA, 19 nt, synthetic construct
  misc_feature 1..19: note = siRNA antisense sequence
  source 1..19: mol_type = other RNA
taataacctaagaagctgt

SEQ ID NO: 66702 - RNA, 19 nt, synthetic construct
  misc_feature 1..19: note = siRNA sense sequence
  source 1..19: mol_type = other RNA
attattattattgcaggcc

SEQ ID NO: 66703 - RNA, 19 nt, synthetic construct
  misc_feature 1..19: note = siRNA antisense sequence
  source 1..19: mol_type = other RNA
ggcctgcaataataataat

SEQ ID NO: 66704 - RNA, 19 nt, synthetic construct
  misc_feature 1..19: note = siRNA sense sequence
  source 1..19: mol_type = other RNA
ttattattattgcaggccc

SEQ ID NO: 66705 - RNA, 19 nt, synthetic construct
  misc_feature 1..19: note = siRNA antisense sequence
  source 1..19: mol_type = other RNA
gggcctgcaataataataa

SEQ ID NO: 66706 - RNA, 19 nt, synthetic construct
  misc_feature 1..19: note = siRNA sense sequence
  source 1..19: mol_type = other RNA
tattattattgcaggccca

SEQ ID NO: 66707 - RNA, 19 nt, synthetic construct
  misc_feature 1..19: note = siRNA antisense sequence
  source 1..19: mol_type = other RNA
tgggcctgcaataataata

SEQ ID NO: 66708 - RNA, 19 nt, synthetic construct
  misc_feature 1..19: note = siRNA sense sequence
  source 1..19: mol_type = other RNA
attattattgcaggcccaa

SEQ ID NO: 66709 - RNA, 19 nt, synthetic construct
  misc_feature 1..19: note = siRNA antisense sequence
  source 1..19: mol_type = other RNA
ttgggcctgcaataataat

SEQ ID NO: 66710 - RNA, 19 nt, synthetic construct
  misc_feature 1..19: note = siRNA sense sequence
  source 1..19: mol_type = other RNA
ttattattgcaggcccaaa

SEQ ID NO: 66711 - RNA, 19 nt, synthetic construct
  misc_feature 1..19: note = siRNA antisense sequence
  source 1..19: mol_type = other RNA
tttgggcctgcaataataa

SEQ ID NO: 66712 - RNA, 19 nt, synthetic construct
  misc_feature 1..19: note = siRNA sense sequence
  source 1..19: mol_type = other RNA
tattattgcaggcccaaaa

SEQ ID NO: 66713 - RNA, 19 nt, synthetic construct
  misc_feature 1..19: note = siRNA antisense sequence
  source 1..19: mol_type = other RNA
ttttgggcctgcaataata

SEQ ID NO: 66714 - RNA, 19 nt, synthetic construct
  misc_feature 1..19: note = siRNA sense sequence
  source 1..19: mol_type = other RNA
attattgcaggcccaaaag

SEQ ID NO: 66715 - RNA, 19 nt, synthetic construct
  misc_feature 1..19: note = siRNA antisense sequence
  source 1..19: mol_type = other RNA
cttttgggcctgcaataat

SEQ ID NO: 66716 - RNA, 19 nt, synthetic construct
  misc_feature 1..19: note = siRNA sense sequence
  source 1..19: mol_type = other RNA
ttattgcaggcccaaaaga

SEQ ID NO: 66717 - RNA, 19 nt, synthetic construct
  misc_feature 1..19: note = siRNA antisense sequence
  source 1..19: mol_type = other RNA
tcttttgggcctgcaataa

SEQ ID NO: 66718 - RNA, 19 nt, synthetic construct
  misc_feature 1..19: note = siRNA sense sequence
  source 1..19: mol_type = other RNA
tattgcaggcccaaaagaa

SEQ ID NO: 66719 - RNA, 19 nt, synthetic construct
  misc_feature 1..19: note = siRNA antisense sequence
  source 1..19: mol_type = other RNA
ttcttttgggcctgcaata

SEQ ID NO: 66720 - RNA, 19 nt, synthetic construct
  misc_feature 1..19: note = siRNA sense sequence
  source 1..19: mol_type = other RNA
attgcaggcccaaaagaag

SEQ ID NO: 66721 - RNA, 19 nt, synthetic construct
  misc_feature 1..19: note = siRNA antisense sequence
  source 1..19: mol_type = other RNA
cttcttttgggcctgcaat

SEQ ID NO: 66722 - RNA, 19 nt, synthetic construct
  misc_feature 1..19: note = siRNA sense sequence
  source 1..19: mol_type = other RNA
ttgcaggcccaaaagaaga

SEQ ID NO: 66723 - RNA, 19 nt, synthetic construct
  misc_feature 1..19: note = siRNA antisense sequence
  source 1..19: mol_type = other RNA
tcttcttttgggcctgcaa

SEQ ID NO: 66724 - RNA, 19 nt, synthetic construct
  misc_feature 1..19: note = siRNA sense sequence
  source 1..19: mol_type = other RNA
tgcaggcccaaaagaagat

SEQ ID NO: 66725 - RNA, 19 nt, synthetic construct
  misc_feature 1..19: note = siRNA antisense sequence
  source 1..19: mol_type = other RNA
atcttcttttgggcctgca

SEQ ID NO: 66726 - RNA, 19 nt, synthetic construct
  misc_feature 1..19: note = siRNA sense sequence
  source 1..19: mol_type = other RNA
gcaggcccaaaagaagatc

SEQ ID NO: 66727 - RNA, 19 nt, synthetic construct
  misc_feature 1..19: note = siRNA antisense sequence
  source 1..19: mol_type = other RNA
gatcttcttttgggcctgc

SEQ ID NO: 66728 - RNA, 19 nt, synthetic construct
  misc_feature 1..19: note = siRNA sense sequence
  source 1..19: mol_type = other RNA
caggcccaaaagaagatca

SEQ ID NO: 66729 - RNA, 19 nt, synthetic construct
  misc_feature 1..19: note = siRNA antisense sequence
  source 1..19: mol_type = other RNA
tgatcttcttttgggcctg

SEQ ID NO: 66730 - RNA, 19 nt, synthetic construct
  misc_feature 1..19: note = siRNA sense sequence
  source 1..19: mol_type = other RNA
aggcccaaaagaagatcat

SEQ ID NO: 66731 - RNA, 19 nt, synthetic construct
  misc_feature 1..19: note = siRNA antisense sequence
  source 1..19: mol_type = other RNA
atgatcttcttttgggcct

SEQ ID NO: 66732 - RNA, 19 nt, synthetic construct
  misc_feature 1..19: note = siRNA sense sequence
  source 1..19: mol_type = other RNA
ggcccaaaagaagatcatt

SEQ ID NO: 66733 - RNA, 19 nt, synthetic construct
  misc_feature 1..19: note = siRNA antisense sequence
  source 1..19: mol_type = other RNA
aatgatcttcttttgggcc

SEQ ID NO: 66734 - RNA, 19 nt, synthetic construct
  misc_feature 1..19: note = siRNA sense sequence
  source 1..19: mol_type = other RNA
gcccaaaagaagatcattt

SEQ ID NO: 66735 - RNA, 19 nt, synthetic construct
  misc_feature 1..19: note = siRNA antisense sequence
  source 1..19: mol_type = other RNA
aaatgatcttcttttgggc

SEQ ID NO: 66736 - RNA, 19 nt, synthetic construct
  misc_feature 1..19: note = siRNA sense sequence
  source 1..19: mol_type = other RNA
actttgggctgtcttaccc

SEQ ID NO: 66737 - RNA, 19 nt, synthetic construct
  misc_feature 1..19: note = siRNA antisense sequence
  source 1..19: mol_type = other RNA
gggtaagacagcccaaagt

SEQ ID NO: 66738 - RNA, 19 nt, synthetic construct
  misc_feature 1..19: note = siRNA sense sequence
  source 1..19: mol_type = other RNA
tgggctgtcttacccggta

SEQ ID NO: 66739 - RNA, 19 nt, synthetic construct
  misc_feature 1..19: note = siRNA antisense sequence
  source 1..19: mol_type = other RNA
taccgggtaagacagccca

SEQ ID NO: 66740 - RNA, 19 nt, synthetic construct
  misc_feature 1..19: note = siRNA sense sequence
  source 1..19: mol_type = other RNA
gggctgtcttacccggtag

SEQ ID NO: 66741 - RNA, 19 nt, synthetic construct
  misc_feature 1..19: note = siRNA antisense sequence
  source 1..19: mol_type = other RNA
ctaccgggtaagacagccc

SEQ ID NO: 66742 - RNA, 19 nt, synthetic construct
  misc_feature 1..19: note = siRNA sense sequence
  source 1..19: mol_type = other RNA
ggctgtcttacccggtaga

SEQ ID NO: 66743 - RNA, 19 nt, synthetic construct
  misc_feature 1..19: note = siRNA antisense sequence
  source 1..19: mol_type = other RNA
tctaccgggtaagacagcc

SEQ ID NO: 66744 - RNA, 19 nt, synthetic construct
  misc_feature 1..19: note = siRNA sense sequence
  source 1..19: mol_type = other RNA
gctgtcttacccggtagaa

SEQ ID NO: 66745 - RNA, 19 nt, synthetic construct
  misc_feature 1..19: note = siRNA antisense sequence
  source 1..19: mol_type = other RNA
ttctaccgggtaagacagc

SEQ ID NO: 66746 - RNA, 19 nt, synthetic construct
  misc_feature 1..19: note = siRNA sense sequence
  source 1..19: mol_type = other RNA
aaatagttcagccacttca

SEQ ID NO: 66747 - RNA, 19 nt, synthetic construct
  misc_feature 1..19: note = siRNA antisense sequence
  source 1..19: mol_type = other RNA
tgaagtggctgaactattt

SEQ ID NO: 66748 - RNA, 19 nt, synthetic construct
  misc_feature 1..19: note = siRNA sense sequence
  source 1..19: mol_type = other RNA
aactgtgattctaaggtag

SEQ ID NO: 66749 - RNA, 19 nt, synthetic construct
  misc_feature 1..19: note = siRNA antisense sequence
  source 1..19: mol_type = other RNA
ctaccttagaatcacagtt

SEQ ID NO: 66750 - RNA, 19 nt, synthetic construct
  misc_feature 1..19: note = siRNA sense sequence
  source 1..19: mol_type = other RNA
ctaaggtagaagggaagaa

SEQ ID NO: 66751 - RNA, 19 nt, synthetic construct
  misc_feature 1..19: note = siRNA antisense sequence
  source 1..19: mol_type = other RNA
ttcttcccttctaccttag

SEQ ID NO: 66752 - RNA, 19 nt, synthetic construct
  misc_feature 1..19: note = siRNA sense sequence
  source 1..19: mol_type = other RNA
aactagctcttatcgaatg

SEQ ID NO: 66753 - RNA, 19 nt, synthetic construct
  misc_feature 1..19: note = siRNA antisense sequence
  source 1..19: mol_type = other RNA
cattcgataagagctagtt

SEQ ID NO: 66754 - RNA, 19 nt, synthetic construct
  misc_feature 1..19: note = siRNA sense sequence
  source 1..19: mol_type = other RNA
actagctcttatcgaatgc

SEQ ID NO: 66755 - RNA, 19 nt, synthetic construct
  misc_feature 1..19: note = siRNA antisense sequence
  source 1..19: mol_type = other RNA
gcattcgataagagctagt

SEQ ID NO: 66756 - RNA, 19 nt, synthetic construct
  misc_feature 1..19: note = siRNA sense sequence
  source 1..19: mol_type = other RNA
ctagctcttatcgaatgct

SEQ ID NO: 66757 - RNA, 19 nt, synthetic construct
  misc_feature 1..19: note = siRNA antisense sequence
  source 1..19: mol_type = other RNA
agcattcgataagagctag

SEQ ID NO: 66758 - RNA, 19 nt, synthetic construct
  misc_feature 1..19: note = siRNA sense sequence
  source 1..19: mol_type = other RNA
tagctcttatcgaatgctt

SEQ ID NO: 66759 - RNA, 19 nt, synthetic construct
  misc_feature 1..19: note = siRNA antisense sequence
  source 1..19: mol_type = other RNA
aagcattcgataagagcta

SEQ ID NO: 66760 - RNA, 19 nt, synthetic construct
  misc_feature 1..19: note = siRNA sense sequence
  source 1..19: mol_type = other RNA
agctcttatcgaatgctta

SEQ ID NO: 66761 - RNA, 19 nt, synthetic construct
  misc_feature 1..19: note = siRNA antisense sequence
  source 1..19: mol_type = other RNA
taagcattcgataagagct

SEQ ID NO: 66762 - RNA, 19 nt, synthetic construct
  misc_feature 1..19: note = siRNA sense sequence
  source 1..19: mol_type = other RNA
gctcttatcgaatgcttac

SEQ ID NO: 66763 - RNA, 19 nt, synthetic construct
  misc_feature 1..19: note = siRNA antisense sequence
  source 1..19: mol_type = other RNA
gtaagcattcgataagagc

SEQ ID NO: 66764 - RNA, 19 nt, synthetic construct
  misc_feature 1..19: note = siRNA sense sequence
  source 1..19: mol_type = other RNA
ctcttatcgaatgcttact

SEQ ID NO: 66765 - RNA, 19 nt, synthetic construct
  misc_feature 1..19: note = siRNA antisense sequence
  source 1..19: mol_type = other RNA
agtaagcattcgataagag

SEQ ID NO: 66766 - RNA, 19 nt, synthetic construct
  misc_feature 1..19: note = siRNA sense sequence
  source 1..19: mol_type = other RNA
tcttatcgaatgcttacta

SEQ ID NO: 66767 - RNA, 19 nt, synthetic construct
  misc_feature 1..19: note = siRNA antisense sequence
  source 1..19: mol_type = other RNA
tagtaagcattcgataaga

SEQ ID NO: 66768 - RNA, 19 nt, synthetic construct
  misc_feature 1..19: note = siRNA sense sequence
  source 1..19: mol_type = other RNA
tactatgtgcagggagcta

SEQ ID NO: 66769 - RNA, 19 nt, synthetic construct
  misc_feature 1..19: note = siRNA antisense sequence
  source 1..19: mol_type = other RNA
tagctccctgcacatagta

SEQ ID NO: 66770 - RNA, 19 nt, synthetic construct
  misc_feature 1..19: note = siRNA sense sequence
  source 1..19: mol_type = other RNA
actatgtgcagggagctat

SEQ ID NO: 66771 - RNA, 19 nt, synthetic construct
  misc_feature 1..19: note = siRNA antisense sequence
  source 1..19: mol_type = other RNA
atagctccctgcacatagt

SEQ ID NO: 66772 - RNA, 19 nt, synthetic construct
  misc_feature 1..19: note = siRNA sense sequence
  source 1..19: mol_type = other RNA
ctatgtgcagggagctatt

SEQ ID NO: 66773 - RNA, 19 nt, synthetic construct
  misc_feature 1..19: note = siRNA antisense sequence
  source 1..19: mol_type = other RNA
aatagctccctgcacatag

SEQ ID NO: 66774 - RNA, 19 nt, synthetic construct
  misc_feature 1..19: note = siRNA sense sequence
  source 1..19: mol_type = other RNA
tatgtgcagggagctattt

SEQ ID NO: 66775 - RNA, 19 nt, synthetic construct
  misc_feature 1..19: note = siRNA antisense sequence
  source 1..19: mol_type = other RNA
aaatagctccctgcacata

SEQ ID NO: 66776 - RNA, 19 nt, synthetic construct
  misc_feature 1..19: note = siRNA sense sequence
  source 1..19: mol_type = other RNA
atgtgcagggagctatttt

SEQ ID NO: 66777 - RNA, 19 nt, synthetic construct
  misc_feature 1..19: note = siRNA antisense sequence
  source 1..19: mol_type = other RNA
aaaatagctccctgcacat

SEQ ID NO: 66778 - RNA, 19 nt, synthetic construct
  misc_feature 1..19: note = siRNA sense sequence
  source 1..19: mol_type = other RNA
tgtgcagggagctatttta

SEQ ID NO: 66779 - RNA, 19 nt, synthetic construct
  misc_feature 1..19: note = siRNA antisense sequence
  source 1..19: mol_type = other RNA
taaaatagctccctgcaca

SEQ ID NO: 66780 - RNA, 19 nt, synthetic construct
  misc_feature 1..19: note = siRNA sense sequence
  source 1..19: mol_type = other RNA
gtgcagggagctattttaa

SEQ ID NO: 66781 - RNA, 19 nt, synthetic construct
  misc_feature 1..19: note = siRNA antisense sequence
  source 1..19: mol_type = other RNA
ttaaaatagctccctgcac

SEQ ID NO: 66782 - RNA, 19 nt, synthetic construct
  misc_feature 1..19: note = siRNA sense sequence
  source 1..19: mol_type = other RNA
tgcagggagctattttaaa

SEQ ID NO: 66783 - RNA, 19 nt, synthetic construct
  misc_feature 1..19: note = siRNA antisense sequence
  source 1..19: mol_type = other RNA
tttaaaatagctccctgca

SEQ ID NO: 66784 - RNA, 19 nt, synthetic construct
  misc_feature 1..19: note = siRNA sense sequence
  source 1..19: mol_type = other RNA
aagcattcccacttaatac

SEQ ID NO: 66785 - RNA, 19 nt, synthetic construct
  misc_feature 1..19: note = siRNA antisense sequence
  source 1..19: mol_type = other RNA
gtattaagtgggaatgctt

SEQ ID NO: 66786 - RNA, 19 nt, synthetic construct
  misc_feature 1..19: note = siRNA sense sequence
  source 1..19: mol_type = other RNA
agcattcccacttaatact

SEQ ID NO: 66787 - RNA, 19 nt, synthetic construct
  misc_feature 1..19: note = siRNA antisense sequence
  source 1..19: mol_type = other RNA
agtattaagtgggaatgct

SEQ ID NO: 66788 - RNA, 19 nt, synthetic construct
  misc_feature 1..19: note = siRNA sense sequence
  source 1..19: mol_type = other RNA
ttcccacttaatactcata

SEQ ID NO: 66789 - RNA, 19 nt, synthetic construct
  misc_feature 1..19: note = siRNA antisense sequence
  source 1..19: mol_type = other RNA
tatgagtattaagtgggaa

SEQ ID NO: 66790 - RNA, 19 nt, synthetic construct
  misc_feature 1..19: note = siRNA sense sequence
  source 1..19: mol_type = other RNA
ccttatgaggtcgtatgaa

SEQ ID NO: 66791 - RNA, 19 nt, synthetic construct
  misc_feature 1..19: note = siRNA antisense sequence
  source 1..19: mol_type = other RNA
ttcatacgacctcataagg

SEQ ID NO: 66792 - RNA, 19 nt, synthetic construct
  misc_feature 1..19: note = siRNA sense sequence
  source 1..19: mol_type = other RNA
aacctcctcttttaagtga

SEQ ID NO: 66793 - RNA, 19 nt, synthetic construct
  misc_feature 1..19: note = siRNA antisense sequence
  source 1..19: mol_type = other RNA
tcacttaaaagaggaggtt

SEQ ID NO: 66794 - RNA, 19 nt, synthetic construct
  misc_feature 1..19: note = siRNA sense sequence
  source 1..19: mol_type = other RNA
gtatatttcccaaagacac

SEQ ID NO: 66795 - RNA, 19 nt, synthetic construct
  misc_feature 1..19: note = siRNA antisense sequence
  source 1..19: mol_type = other RNA
gtgtctttgggaaatatac

SEQ ID NO: 66796 - RNA, 19 nt, synthetic construct
  misc_feature 1..19: note = siRNA sense sequence
  source 1..19: mol_type = other RNA
gagtaaggatctgaattct

SEQ ID NO: 66797 - RNA, 19 nt, synthetic construct
  misc_feature 1..19: note = siRNA antisense sequence
  source 1..19: mol_type = other RNA
agaattcagatccttactc

SEQ ID NO: 66798 - RNA, 19 nt, synthetic construct
  misc_feature 1..19: note = siRNA sense sequence
  source 1..19: mol_type = other RNA
gtaaggatctgaattctgt

SEQ ID NO: 66799 - RNA, 19 nt, synthetic construct
  misc_feature 1..19: note = siRNA antisense sequence
  source 1..19: mol_type = other RNA
acagaattcagatccttac

SEQ ID NO: 66800 - RNA, 19 nt, synthetic construct
  misc_feature 1..19: note = siRNA sense sequence
  source 1..19: mol_type = other RNA
taaggatctgaattctgtg

SEQ ID NO: 66801 - RNA, 19 nt, synthetic construct
  misc_feature 1..19: note = siRNA antisense sequence
  source 1..19: mol_type = other RNA
cacagaattcagatcctta

SEQ ID NO: 66802 - RNA, 19 nt, synthetic construct
  misc_feature 1..19: note = siRNA sense sequence
  source 1..19: mol_type = other RNA
ggatctgaattctgtgcca

SEQ ID NO: 66803 - RNA, 19 nt, synthetic construct
  misc_feature 1..19: note = siRNA antisense sequence
  source 1..19: mol_type = other RNA
tggcacagaattcagatcc

SEQ ID NO: 66804 - RNA, 19 nt, synthetic construct
  misc_feature 1..19: note = siRNA sense sequence
  source 1..19: mol_type = other RNA
aaccactgactattatcac

SEQ ID NO: 66805 - RNA, 19 nt, synthetic construct
  misc_feature 1..19: note = siRNA antisense sequence
  source 1..19: mol_type = other RNA
gtgataatagtcagtggtt

SEQ ID NO: 66806 - RNA, 19 nt, synthetic construct
  misc_feature 1..19: note = siRNA sense sequence
  source 1..19: mol_type = other RNA
accactgactattatcact

SEQ ID NO: 66807 - RNA, 19 nt, synthetic construct
  misc_feature 1..19: note = siRNA antisense sequence
  source 1..19: mol_type = other RNA
agtgataatagtcagtggt

SEQ ID NO: 66808 - RNA, 19 nt, synthetic construct
  misc_feature 1..19: note = siRNA sense sequence
  source 1..19: mol_type = other RNA
ccactgactattatcactc

SEQ ID NO: 66809 - RNA, 19 nt, synthetic construct
  misc_feature 1..19: note = siRNA antisense sequence
  source 1..19: mol_type = other RNA
gagtgataatagtcagtgg

SEQ ID NO: 66810 - RNA, 19 nt, synthetic construct
  misc_feature 1..19: note = siRNA sense sequence
  source 1..19: mol_type = other RNA
cactgactattatcactct

SEQ ID NO: 66811 - RNA, 19 nt, synthetic construct
  misc_feature 1..19: note = siRNA antisense sequence
  source 1..19: mol_type = other RNA
agagtgataatagtcagtg

SEQ ID NO: 66812 - RNA, 19 nt, synthetic construct
  misc_feature 1..19: note = siRNA sense sequence
  source 1..19: mol_type = other RNA
gactattatcactctgtgt

SEQ ID NO: 66813 - RNA, 19 nt, synthetic construct
  misc_feature 1..19: note = siRNA antisense sequence
  source 1..19: mol_type = other RNA
acacagagtgataatagtc

SEQ ID NO: 66814 - RNA, 19 nt, synthetic construct
  misc_feature 1..19: note = siRNA sense sequence
  source 1..19: mol_type = other RNA
actattatcactctgtgtt

SEQ ID NO: 66815 - RNA, 19 nt, synthetic construct
  misc_feature 1..19: note = siRNA antisense sequence
  source 1..19: mol_type = other RNA
aacacagagtgataatagt

SEQ ID NO: 66816 - RNA, 19 nt, synthetic construct
  misc_feature 1..19: note = siRNA sense sequence
  source 1..19: mol_type = other RNA
ctattatcactctgtgttc

SEQ ID NO: 66817 - RNA, 19 nt, synthetic construct
  misc_feature 1..19: note = siRNA antisense sequence
  source 1..19: mol_type = other RNA
gaacacagagtgataatag

SEQ ID NO: 66818 - RNA, 19 nt, synthetic construct
  misc_feature 1..19: note = siRNA sense sequence
  source 1..19: mol_type = other RNA
tattatcactctgtgttct

SEQ ID NO: 66819 - RNA, 19 nt, synthetic construct
  misc_feature 1..19: note = siRNA antisense sequence
  source 1..19: mol_type = other RNA
agaacacagagtgataata

SEQ ID NO: 66820 - RNA, 19 nt, synthetic construct
  misc_feature 1..19: note = siRNA sense sequence
  source 1..19: mol_type = other RNA
tccattcactctggtgtcc

SEQ ID NO: 66821 - RNA, 19 nt, synthetic construct
  misc_feature 1..19: note = siRNA antisense sequence
  source 1..19: mol_type = other RNA
ggacaccagagtgaatgga

SEQ ID NO: 66822 - RNA, 19 nt, synthetic construct
  misc_feature 1..19: note = siRNA sense sequence
  source 1..19: mol_type = other RNA
ccattcactctggtgtcct

SEQ ID NO: 66823 - RNA, 19 nt, synthetic construct
  misc_feature 1..19: note = siRNA antisense sequence
  source 1..19: mol_type = other RNA
aggacaccagagtgaatgg

SEQ ID NO: 66824 - RNA, 19 nt, synthetic construct
  misc_feature 1..19: note = siRNA sense sequence
  source 1..19: mol_type = other RNA
caatcttttcgaccaagta

SEQ ID NO: 66825 - RNA, 19 nt, synthetic construct
  misc_feature 1..19: note = siRNA antisense sequence
  source 1..19: mol_type = other RNA
tacttggtcgaaaagattg

SEQ ID NO: 66826 - RNA, 19 nt, synthetic construct
  misc_feature 1..19: note = siRNA sense sequence
  source 1..19: mol_type = other RNA
aatcttttcgaccaagtat

SEQ ID NO: 66827 - RNA, 19 nt, synthetic construct
  misc_feature 1..19: note = siRNA antisense sequence
  source 1..19: mol_type = other RNA
atacttggtcgaaaagatt

SEQ ID NO: 66828 - RNA, 19 nt, synthetic construct
  misc_feature 1..19: note = siRNA sense sequence
  source 1..19: mol_type = other RNA
ttcgaccaagtattttaac

SEQ ID NO: 66829 - RNA, 19 nt, synthetic construct
  misc_feature 1..19: note = siRNA antisense sequence
  source 1..19: mol_type = other RNA
gttaaaatacttggtcgaa

SEQ ID NO: 66830 - RNA, 19 nt, synthetic construct
  misc_feature 1..19: note = siRNA sense sequence
  source 1..19: mol_type = other RNA
tcgaccaagtattttaact

SEQ ID NO: 66831 - RNA, 19 nt, synthetic construct
  misc_feature 1..19: note = siRNA antisense sequence
  source 1..19: mol_type = other RNA
agttaaaatacttggtcga

SEQ ID NO: 66832 - RNA, 19 nt, synthetic construct
  misc_feature 1..19: note = siRNA sense sequence
  source 1..19: mol_type = other RNA
cgaccaagtattttaacta

SEQ ID NO: 66833 - RNA, 19 nt, synthetic construct
  misc_feature 1..19: note = siRNA antisense sequence
  source 1..19: mol_type = other RNA
tagttaaaatacttggtcg

SEQ ID NO: 66834 - RNA, 19 nt, synthetic construct
  misc_feature 1..19: note = siRNA sense sequence
  source 1..19: mol_type = other RNA
gaccaagtattttaactac

SEQ ID NO: 66835 - RNA, 19 nt, synthetic construct
  misc_feature 1..19: note = siRNA antisense sequence
  source 1..19: mol_type = other RNA
gtagttaaaatacttggtc

SEQ ID NO: 66836 - RNA, 19 nt, synthetic construct
  misc_feature 1..19: note = siRNA sense sequence
  source 1..19: mol_type = other RNA
ctacattttacacctgagg

SEQ ID NO: 66837 - RNA, 19 nt, synthetic construct
  misc_feature 1..19: note = siRNA antisense sequence
  source 1..19: mol_type = other RNA
cctcaggtgtaaaatgtag

SEQ ID NO: 66838 - RNA, 19 nt, synthetic construct
  misc_feature 1..19: note = siRNA sense sequence
  source 1..19: mol_type = other RNA
ttttacacctgaggacatt

SEQ ID NO: 66839 - RNA, 19 nt, synthetic construct
  misc_feature 1..19: note = siRNA antisense sequence
  source 1..19: mol_type = other RNA
aatgtcctcaggtgtaaaa

SEQ ID NO: 66840 - RNA, 19 nt, synthetic construct
  misc_feature 1..19: note = siRNA sense sequence
  source 1..19: mol_type = other RNA
tttacacctgaggacatta

SEQ ID NO: 66841 - RNA, 19 nt, synthetic construct
  misc_feature 1..19: note = siRNA antisense sequence
  source 1..19: mol_type = other RNA
taatgtcctcaggtgtaaa

SEQ ID NO: 66842 - RNA, 19 nt, synthetic construct
  misc_feature 1..19: note = siRNA sense sequence
  source 1..19: mol_type = other RNA
ttacacctgaggacattaa

SEQ ID NO: 66843 - RNA, 19 nt, synthetic construct
  misc_feature 1..19: note = siRNA antisense sequence
  source 1..19: mol_type = other RNA
ttaatgtcctcaggtgtaa

SEQ ID NO: 66844 - RNA, 19 nt, synthetic construct
  misc_feature 1..19: note = siRNA sense sequence
  source 1..19: mol_type = other RNA
tacacctgaggacattaaa

SEQ ID NO: 66845 - RNA, 19 nt, synthetic construct
  misc_feature 1..19: note = siRNA antisense sequence
  source 1..19: mol_type = other RNA
tttaatgtcctcaggtgta

SEQ ID NO: 66846 - RNA, 19 nt, synthetic construct
  misc_feature 1..19: note = siRNA sense sequence
  source 1..19: mol_type = other RNA
acacctgaggacattaaag

SEQ ID NO: 66847 - RNA, 19 nt, synthetic construct
  misc_feature 1..19: note = siRNA antisense sequence
  source 1..19: mol_type = other RNA
ctttaatgtcctcaggtgt

SEQ ID NO: 66848 - RNA, 19 nt, synthetic construct
  misc_feature 1..19: note = siRNA sense sequence
  source 1..19: mol_type = other RNA
cacctgaggacattaaagc

SEQ ID NO: 66849 - RNA, 19 nt, synthetic construct
  misc_feature 1..19: note = siRNA antisense sequence
  source 1..19: mol_type = other RNA
gctttaatgtcctcaggtg

SEQ ID NO: 66850 - RNA, 19 nt, synthetic construct
  misc_feature 1..19: note = siRNA sense sequence
  source 1..19: mol_type = other RNA
acctgaggacattaaagca

SEQ ID NO: 66851 - RNA, 19 nt, synthetic construct
  misc_feature 1..19: note = siRNA antisense sequence
  source 1..19: mol_type = other RNA
tgctttaatgtcctcaggt

SEQ ID NO: 66852 - RNA, 19 nt, synthetic construct
  misc_feature 1..19: note = siRNA sense sequence
  source 1..19: mol_type = other RNA
cctgaggacattaaagcaa

SEQ ID NO: 66853 - RNA, 19 nt, synthetic construct
  misc_feature 1..19: note = siRNA antisense sequence
  source 1..19: mol_type = other RNA
ttgctttaatgtcctcagg

SEQ ID NO: 66854 - RNA, 19 nt, synthetic construct
  misc_feature 1..19: note = siRNA sense sequence
  source 1..19: mol_type = other RNA
ctgaggacattaaagcaaa

SEQ ID NO: 66855 - RNA, 19 nt, synthetic construct
  misc_feature 1..19: note = siRNA antisense sequence
  source 1..19: mol_type = other RNA
tttgctttaatgtcctcag

SEQ ID NO: 66856 - RNA, 19 nt, synthetic construct
  misc_feature 1..19: note = siRNA sense sequence
  source 1..19: mol_type = other RNA
tgaggacattaaagcaaag

SEQ ID NO: 66857 - RNA, 19 nt, synthetic construct
  misc_feature 1..19: note = siRNA antisense sequence
  source 1..19: mol_type = other RNA
ctttgctttaatgtcctca

SEQ ID NO: 66858 - RNA, 19 nt, synthetic construct
  misc_feature 1..19: note = siRNA sense sequence
  source 1..19: mol_type = other RNA
gaggacattaaagcaaagg

SEQ ID NO: 66859 - RNA, 19 nt, synthetic construct
  misc_feature 1..19: note = siRNA antisense sequence
  source 1..19: mol_type = other RNA
cctttgctttaatgtcctc

SEQ ID NO: 66860 - RNA, 19 nt, synthetic construct
  misc_feature 1..19: note = siRNA sense sequence
  source 1..19: mol_type = other RNA
attaaagcaaagggaggta

SEQ ID NO: 66861 - RNA, 19 nt, synthetic construct
  misc_feature 1..19: note = siRNA antisense sequence
  source 1..19: mol_type = other RNA
tacctccctttgctttaat

SEQ ID NO: 66862 - RNA, 19 nt, synthetic construct
  misc_feature 1..19: note = siRNA sense sequence
  source 1..19: mol_type = other RNA
ttaaagcaaagggaggtaa

SEQ ID NO: 66863 - RNA, 19 nt, synthetic construct
  misc_feature 1..19: note = siRNA antisense sequence
  source 1..19: mol_type = other RNA
ttacctccctttgctttaa

SEQ ID NO: 66864 - RNA, 19 nt, synthetic construct
  misc_feature 1..19: note = siRNA sense sequence
  source 1..19: mol_type = other RNA
taaagcaaagggaggtaaa

SEQ ID NO: 66865 - RNA, 19 nt, synthetic construct
  misc_feature 1..19: note = siRNA antisense sequence
  source 1..19: mol_type = other RNA
tttacctccctttgcttta

SEQ ID NO: 66866 - RNA, 19 nt, synthetic construct
  misc_feature 1..19: note = siRNA sense sequence
  source 1..19: mol_type = other RNA
aaagcaaagggaggtaaag

SEQ ID NO: 66867 - RNA, 19 nt, synthetic construct
  misc_feature 1..19: note = siRNA antisense sequence
  source 1..19: mol_type = other RNA
ctttacctccctttgcttt

SEQ ID NO: 66868 - RNA, 19 nt, synthetic construct
  misc_feature 1..19: note = siRNA sense sequence
  source 1..19: mol_type = other RNA
agggaggtaaagtgactct

SEQ ID NO: 66869 - RNA, 19 nt, synthetic construct
  misc_feature 1..19: note = siRNA antisense sequence
  source 1..19: mol_type = other RNA
agagtcactttacctccct

SEQ ID NO: 66870 - RNA, 19 nt, synthetic construct
  misc_feature 1..19: note = siRNA sense sequence
  source 1..19: mol_type = other RNA
gggaggtaaagtgactctc

SEQ ID NO: 66871 - RNA, 19 nt, synthetic construct
  misc_feature 1..19: note = siRNA antisense sequence
  source 1..19: mol_type = other RNA
gagagtcactttacctccc

SEQ ID NO: 66872 - RNA, 19 nt, synthetic construct
  misc_feature 1..19: note = siRNA sense sequence
  source 1..19: mol_type = other RNA
taaagtgactctcccatga

SEQ ID NO: 66873 - RNA, 19 nt, synthetic construct
  misc_feature 1..19: note = siRNA antisense sequence
  source 1..19: mol_type = other RNA
tcatgggagagtcacttta

SEQ ID NO: 66874 - RNA, 19 nt, synthetic construct
  misc_feature 1..19: note = siRNA sense sequence
  source 1..19: mol_type = other RNA
aaagtgactctcccatgat

SEQ ID NO: 66875 - RNA, 19 nt, synthetic construct
  misc_feature 1..19: note = siRNA antisense sequence
  source 1..19: mol_type = other RNA
atcatgggagagtcacttt

SEQ ID NO: 66876 - RNA, 19 nt, synthetic construct
  misc_feature 1..19: note = siRNA sense sequence
  source 1..19: mol_type = other RNA
aagtgactctcccatgatt

SEQ ID NO: 66877 - RNA, 19 nt, synthetic construct
  misc_feature 1..19: note = siRNA antisense sequence
  source 1..19: mol_type = other RNA
aatcatgggagagtcactt

SEQ ID NO: 66878 - RNA, 19 nt, synthetic construct
  misc_feature 1..19: note = siRNA sense sequence
  source 1..19: mol_type = other RNA
agtgactctcccatgatta

SEQ ID NO: 66879 - RNA, 19 nt, synthetic construct
  misc_feature 1..19: note = siRNA antisense sequence
  source 1..19: mol_type = other RNA
taatcatgggagagtcact

SEQ ID NO: 66880 - RNA, 19 nt, synthetic construct
  misc_feature 1..19: note = siRNA sense sequence
  source 1..19: mol_type = other RNA
gtgactctcccatgattac

SEQ ID NO: 66881 - RNA, 19 nt, synthetic construct
  misc_feature 1..19: note = siRNA antisense sequence
  source 1..19: mol_type = other RNA
gtaatcatgggagagtcac

SEQ ID NO: 66882 - RNA, 19 nt, synthetic construct
  misc_feature 1..19: note = siRNA sense sequence
  source 1..19: mol_type = other RNA
tgactctcccatgattact

SEQ ID NO: 66883 - RNA, 19 nt, synthetic construct
  misc_feature 1..19: note = siRNA antisense sequence
  source 1..19: mol_type = other RNA
agtaatcatgggagagtca

SEQ ID NO: 66884 - RNA, 19 nt, synthetic construct
  misc_feature 1..19: note = siRNA sense sequence
  source 1..19: mol_type = other RNA
gactctcccatgattacta

SEQ ID NO: 66885 - RNA, 19 nt, synthetic construct
  misc_feature 1..19: note = siRNA antisense sequence
  source 1..19: mol_type = other RNA
tagtaatcatgggagagtc

SEQ ID NO: 66886 - RNA, 19 nt, synthetic construct
  misc_feature 1..19: note = siRNA sense sequence
  source 1..19: mol_type = other RNA
ctcccatgattactagcta

SEQ ID NO: 66887 - RNA, 19 nt, synthetic construct
  misc_feature 1..19: note = siRNA antisense sequence
  source 1..19: mol_type = other RNA
tagctagtaatcatgggag

SEQ ID NO: 66888 - RNA, 19 nt, synthetic construct
  misc_feature 1..19: note = siRNA sense sequence
  source 1..19: mol_type = other RNA
tcccatgattactagctag

SEQ ID NO: 66889 - RNA, 19 nt, synthetic construct
  misc_feature 1..19: note = siRNA antisense sequence
  source 1..19: mol_type = other RNA
ctagctagtaatcatggga

SEQ ID NO: 66890 - RNA, 19 nt, synthetic construct
  misc_feature 1..19: note = siRNA sense sequence
  source 1..19: mol_type = other RNA
cccatgattactagctagt

SEQ ID NO: 66891 - RNA, 19 nt, synthetic construct
  misc_feature 1..19: note = siRNA antisense sequence
  source 1..19: mol_type = other RNA
actagctagtaatcatggg

SEQ ID NO: 66892 - RNA, 19 nt, synthetic construct
  misc_feature 1..19: note = siRNA sense sequence
  source 1..19: mol_type = other RNA
tagtaaatgactggattca

SEQ ID NO: 66893 - RNA, 19 nt, synthetic construct
  misc_feature 1..19: note = siRNA antisense sequence
  source 1..19: mol_type = other RNA
tgaatccagtcatttacta

SEQ ID NO: 66894 - RNA, 19 nt, synthetic construct
  misc_feature 1..19: note = siRNA sense sequence
  source 1..19: mol_type = other RNA
agtaaatgactggattcaa

SEQ ID NO: 66895 - RNA, 19 nt, synthetic construct
  misc_feature 1..19: note = siRNA antisense sequence
  source 1..19: mol_type = other RNA
ttgaatccagtcatttact

SEQ ID NO: 66896 - RNA, 19 nt, synthetic construct
  misc_feature 1..19: note = siRNA sense sequence
  source 1..19: mol_type = other RNA
gtaaatgactggattcaag

SEQ ID NO: 66897 - RNA, 19 nt, synthetic construct
  misc_feature 1..19: note = siRNA antisense sequence
  source 1..19: mol_type = other RNA
cttgaatccagtcatttac

SEQ ID NO: 66898 - RNA, 19 nt, synthetic construct
  misc_feature 1..19: note = siRNA sense sequence
  source 1..19: mol_type = other RNA
taaatgactggattcaagg

SEQ ID NO: 66899 - RNA, 19 nt, synthetic construct
  misc_feature 1..19: note = siRNA antisense sequence
  source 1..19: mol_type = other RNA
ccttgaatccagtcattta

SEQ ID NO: 66900 - RNA, 19 nt, synthetic construct
  misc_feature 1..19: note = siRNA sense sequence
  source 1..19: mol_type = other RNA
aaatgactggattcaagga

SEQ ID NO: 66901 - RNA, 19 nt, synthetic construct
  misc_feature 1..19: note = siRNA antisense sequence
  source 1..19: mol_type = other RNA
tccttgaatccagtcattt

SEQ ID NO: 66902 - RNA, 19 nt, synthetic construct
  misc_feature 1..19: note = siRNA sense sequence
  source 1..19: mol_type = other RNA
aatgactggattcaaggaa

SEQ ID NO: 66903 - RNA, 19 nt, synthetic construct
  misc_feature 1..19: note = siRNA antisense sequence
  source 1..19: mol_type = other RNA
ttccttgaatccagtcatt

SEQ ID NO: 66904 - RNA, 19 nt, synthetic construct
  misc_feature 1..19: note = siRNA sense sequence
  source 1..19: mol_type = other RNA
tcaaggaatgatctacaga

SEQ ID NO: 66905 - RNA, 19 nt, synthetic construct
  misc_feature 1..19: note = siRNA antisense sequence
  source 1..19: mol_type = other RNA
tctgtagatcattccttga

SEQ ID NO: 66906 - RNA, 19 nt, synthetic construct
  misc_feature 1..19: note = siRNA sense sequence
  source 1..19: mol_type = other RNA
caaggaatgatctacagag

SEQ ID NO: 66907 - RNA, 19 nt, synthetic construct
  misc_feature 1..19: note = siRNA antisense sequence
  source 1..19: mol_type = other RNA
ctctgtagatcattccttg

SEQ ID NO: 66908 - RNA, 19 nt, synthetic construct
  misc_feature 1..19: note = siRNA sense sequence
  source 1..19: mol_type = other RNA
aaggaatgatctacagagc

SEQ ID NO: 66909 - RNA, 19 nt, synthetic construct
  misc_feature 1..19: note = siRNA antisense sequence
  source 1..19: mol_type = other RNA
gctctgtagatcattcctt

SEQ ID NO: 66910 - RNA, 19 nt, synthetic construct
  misc_feature 1..19: note = siRNA sense sequence
  source 1..19: mol_type = other RNA
aggaatgatctacagagct

SEQ ID NO: 66911 - RNA, 19 nt, synthetic construct
  misc_feature 1..19: note = siRNA antisense sequence
  source 1..19: mol_type = other RNA
agctctgtagatcattcct

SEQ ID NO: 66912 - RNA, 19 nt, synthetic construct
  misc_feature 1..19: note = siRNA sense sequence
  source 1..19: mol_type = other RNA
ggaatgatctacagagctc

SEQ ID NO: 66913 - RNA, 19 nt, synthetic construct
  misc_feature 1..19: note = siRNA antisense sequence
  source 1..19: mol_type = other RNA
gagctctgtagatcattcc

SEQ ID NO: 66914 - RNA, 19 nt, synthetic construct
  misc_feature 1..19: note = siRNA sense sequence
  source 1..19: mol_type = other RNA
atgatctacagagctcttt

SEQ ID NO: 66915 - RNA, 19 nt, synthetic construct
  misc_feature 1..19: note = siRNA antisense sequence
  source 1..19: mol_type = other RNA
aaagagctctgtagatcat

SEQ ID NO: 66916 - RNA, 19 nt, synthetic construct
  misc_feature 1..19: note = siRNA sense sequence
  source 1..19: mol_type = other RNA
gatctacagagctctttct

SEQ ID NO: 66917 - RNA, 19 nt, synthetic construct
  misc_feature 1..19: note = siRNA antisense sequence
  source 1..19: mol_type = other RNA
agaaagagctctgtagatc

SEQ ID NO: 66918 - RNA, 19 nt, synthetic construct
  misc_feature 1..19: note = siRNA sense sequence
  source 1..19: mol_type = other RNA
tatcctactgctgcaggct

SEQ ID NO: 66919 - RNA, 19 nt, synthetic construct
  misc_feature 1..19: note = siRNA antisense sequence
  source 1..19: mol_type = other RNA
agcctgcagcagtaggata

SEQ ID NO: 66920 - RNA, 19 nt, synthetic construct
  misc_feature 1..19: note = siRNA sense sequence
  source 1..19: mol_type = other RNA
atcctactgctgcaggcta

SEQ ID NO: 66921 - RNA, 19 nt, synthetic construct
  misc_feature 1..19: note = siRNA antisense sequence
  source 1..19: mol_type = other RNA
tagcctgcagcagtaggat

SEQ ID NO: 66922 - RNA, 19 nt, synthetic construct
  misc_feature 1..19: note = siRNA sense sequence
  source 1..19: mol_type = other RNA
tcctactgctgcaggctat

SEQ ID NO: 66923 - RNA, 19 nt, synthetic construct
  misc_feature 1..19: note = siRNA antisense sequence
  source 1..19: mol_type = other RNA
atagcctgcagcagtagga

SEQ ID NO: 66924 - RNA, 19 nt, synthetic construct
  misc_feature 1..19: note = siRNA sense sequence
  source 1..19: mol_type = other RNA
cctactgctgcaggctata

SEQ ID NO: 66925 - RNA, 19 nt, synthetic construct
  misc_feature 1..19: note = siRNA antisense sequence
  source 1..19: mol_type = other RNA
tatagcctgcagcagtagg

SEQ ID NO: 66926 - RNA, 19 nt, synthetic construct
  misc_feature 1..19: note = siRNA sense sequence
  source 1..19: mol_type = other RNA
ctactgctgcaggctatag

SEQ ID NO: 66927 - RNA, 19 nt, synthetic construct
  misc_feature 1..19: note = siRNA antisense sequence
  source 1..19: mol_type = other RNA
ctatagcctgcagcagtag

SEQ ID NO: 66928 - RNA, 19 nt, synthetic construct
  misc_feature 1..19: note = siRNA sense sequence
  source 1..19: mol_type = other RNA
tactgctgcaggctatagg

SEQ ID NO: 66929 - RNA, 19 nt, synthetic construct
  misc_feature 1..19: note = siRNA antisense sequence
  source 1..19: mol_type = other RNA
cctatagcctgcagcagta

SEQ ID NO: 66930 - RNA, 19 nt, synthetic construct
  misc_feature 1..19: note = siRNA sense sequence
  source 1..19: mol_type = other RNA
actgctgcaggctataggg

SEQ ID NO: 66931 - RNA, 19 nt, synthetic construct
  misc_feature 1..19: note = siRNA antisense sequence
  source 1..19: mol_type = other RNA
ccctatagcctgcagcagt

SEQ ID NO: 66932 - RNA, 19 nt, synthetic construct
  misc_feature 1..19: note = siRNA sense sequence
  source 1..19: mol_type = other RNA
ctgctgcaggctatagggt

SEQ ID NO: 66933 - RNA, 19 nt, synthetic construct
  misc_feature 1..19: note = siRNA antisense sequence
  source 1..19: mol_type = other RNA
accctatagcctgcagcag

SEQ ID NO: 66934 - RNA, 19 nt, synthetic construct
  misc_feature 1..19: note = siRNA sense sequence
  source 1..19: mol_type = other RNA
tgctgcaggctatagggta

SEQ ID NO: 66935 - RNA, 19 nt, synthetic construct
  misc_feature 1..19: note = siRNA antisense sequence
  source 1..19: mol_type = other RNA
taccctatagcctgcagca

SEQ ID NO: 66936 - RNA, 19 nt, synthetic construct
  misc_feature 1..19: note = siRNA sense sequence
  source 1..19: mol_type = other RNA
gctgcaggctatagggtag

SEQ ID NO: 66937 - RNA, 19 nt, synthetic construct
  misc_feature 1..19: note = siRNA antisense sequence
  source 1..19: mol_type = other RNA
ctaccctatagcctgcagc

SEQ ID NO: 66938 - RNA, 19 nt, synthetic construct
  misc_feature 1..19: note = siRNA sense sequence
  source 1..19: mol_type = other RNA
ctgcaggctatagggtagg

SEQ ID NO: 66939 - RNA, 19 nt, synthetic construct
  misc_feature 1..19: note = siRNA antisense sequence
  source 1..19: mol_type = other RNA
cctaccctatagcctgcag

SEQ ID NO: 66940 - RNA, 19 nt, synthetic construct
  misc_feature 1..19: note = siRNA sense sequence
  source 1..19: mol_type = other RNA
tgcaggctatagggtaggg

SEQ ID NO: 66941 - RNA, 19 nt, synthetic construct
  misc_feature 1..19: note = siRNA antisense sequence
  source 1..19: mol_type = other RNA
ccctaccctatagcctgca

SEQ ID NO: 66942 - RNA, 19 nt, synthetic construct
  misc_feature 1..19: note = siRNA sense sequence
  source 1..19: mol_type = other RNA
gcaggctatagggtagggc

SEQ ID NO: 66943 - RNA, 19 nt, synthetic construct
  misc_feature 1..19: note = siRNA antisense sequence
  source 1..19: mol_type = other RNA
gccctaccctatagcctgc

SEQ ID NO: 66944 - RNA, 19 nt, synthetic construct
  misc_feature 1..19: note = siRNA sense sequence
  source 1..19: mol_type = other RNA
gctatagggtagggctctt

SEQ ID NO: 66945 - RNA, 19 nt, synthetic construct
  misc_feature 1..19: note = siRNA antisense sequence
  source 1..19: mol_type = other RNA
aagagccctaccctatagc

SEQ ID NO: 66946 - RNA, 19 nt, synthetic construct
  misc_feature 1..19: note = siRNA sense sequence
  source 1..19: mol_type = other RNA
ctatagggtagggctcttt

SEQ ID NO: 66947 - RNA, 19 nt, synthetic construct
  misc_feature 1..19: note = siRNA antisense sequence
  source 1..19: mol_type = other RNA
aaagagccctaccctatag

SEQ ID NO: 66948 - RNA, 19 nt, synthetic construct
  misc_feature 1..19: note = siRNA sense sequence
  source 1..19: mol_type = other RNA
tatagggtagggctcttta

SEQ ID NO: 66949 - RNA, 19 nt, synthetic construct
  misc_feature 1..19: note = siRNA antisense sequence
  source 1..19: mol_type = other RNA
taaagagccctaccctata

SEQ ID NO: 66950 - RNA, 19 nt, synthetic construct
  misc_feature 1..19: note = siRNA sense sequence
  source 1..19: mol_type = other RNA
atagggtagggctctttac

SEQ ID NO: 66951 - RNA, 19 nt, synthetic construct
  misc_feature 1..19: note = siRNA antisense sequence
  source 1..19: mol_type = other RNA
gtaaagagccctaccctat

SEQ ID NO: 66952 - RNA, 19 nt, synthetic construct
  misc_feature 1..19: note = siRNA sense sequence
  source 1..19: mol_type = other RNA
tagggtagggctctttact

SEQ ID NO: 66953 - RNA, 19 nt, synthetic construct
  misc_feature 1..19: note = siRNA antisense sequence
  source 1..19: mol_type = other RNA
agtaaagagccctacccta

SEQ ID NO: 66954 - RNA, 19 nt, synthetic construct
  misc_feature 1..19: note = siRNA sense sequence
  source 1..19: mol_type = other RNA
agggtagggctctttactc

SEQ ID NO: 66955 - RNA, 19 nt, synthetic construct
  misc_feature 1..19: note = siRNA antisense sequence
  source 1..19: mol_type = other RNA
gagtaaagagccctaccct

SEQ ID NO: 66956 - RNA, 19 nt, synthetic construct
  misc_feature 1..19: note = siRNA sense sequence
  source 1..19: mol_type = other RNA
gggtagggctctttactct

SEQ ID NO: 66957 - RNA, 19 nt, synthetic construct
  misc_feature 1..19: note = siRNA antisense sequence
  source 1..19: mol_type = other RNA
agagtaaagagccctaccc

SEQ ID NO: 66958 - RNA, 19 nt, synthetic construct
  misc_feature 1..19: note = siRNA sense sequence
  source 1..19: mol_type = other RNA
agggctctttactctggag

SEQ ID NO: 66959 - RNA, 19 nt, synthetic construct
  misc_feature 1..19: note = siRNA antisense sequence
  source 1..19: mol_type = other RNA
ctccagagtaaagagccct

SEQ ID NO: 66960 - RNA, 19 nt, synthetic construct
  misc_feature 1..19: note = siRNA sense sequence
  source 1..19: mol_type = other RNA
ctctttactctggagctcc

SEQ ID NO: 66961 - RNA, 19 nt, synthetic construct
  misc_feature 1..19: note = siRNA antisense sequence
  source 1..19: mol_type = other RNA
ggagctccagagtaaagag

SEQ ID NO: 66962 - RNA, 19 nt, synthetic construct
  misc_feature 1..19: note = siRNA sense sequence
  source 1..19: mol_type = other RNA
tctttactctggagctcca

SEQ ID NO: 66963 - RNA, 19 nt, synthetic construct
  misc_feature 1..19: note = siRNA antisense sequence
  source 1..19: mol_type = other RNA
tggagctccagagtaaaga

SEQ ID NO: 66964 - RNA, 19 nt, synthetic construct
  misc_feature 1..19: note = siRNA sense sequence
  source 1..19: mol_type = other RNA
cataatactgtctttggtt

SEQ ID NO: 66965 - RNA, 19 nt, synthetic construct
  misc_feature 1..19: note = siRNA antisense sequence
  source 1..19: mol_type = other RNA
aaccaaagacagtattatg

SEQ ID NO: 66966 - RNA, 19 nt, synthetic construct
  misc_feature 1..19: note = siRNA sense sequence
  source 1..19: mol_type = other RNA
tttggttttggaatgaggg

SEQ ID NO: 66967 - RNA, 19 nt, synthetic construct
  misc_feature 1..19: note = siRNA antisense sequence
  source 1..19: mol_type = other RNA
ccctcattccaaaaccaaa

SEQ ID NO: 66968 - RNA, 19 nt, synthetic construct
  misc_feature 1..19: note = siRNA sense sequence
  source 1..19: mol_type = other RNA
tttggaatgagggtccctg

SEQ ID NO: 66969 - RNA, 19 nt, synthetic construct
  misc_feature 1..19: note = siRNA antisense sequence
  source 1..19: mol_type = other RNA
cagggaccctcattccaaa

SEQ ID NO: 66970 - RNA, 19 nt, synthetic construct
  misc_feature 1..19: note = siRNA sense sequence
  source 1..19: mol_type = other RNA
gaatgagggtccctggttg

SEQ ID NO: 66971 - RNA, 19 nt, synthetic construct
  misc_feature 1..19: note = siRNA antisense sequence
  source 1..19: mol_type = other RNA
caaccagggaccctcattc

SEQ ID NO: 66972 - RNA, 19 nt, synthetic construct
  misc_feature 1..19: note = siRNA sense sequence
  source 1..19: mol_type = other RNA
aatgagggtccctggttgg

SEQ ID NO: 66973 - RNA, 19 nt, synthetic construct
  misc_feature 1..19: note = siRNA antisense sequence
  source 1..19: mol_type = other RNA
ccaaccagggaccctcatt

SEQ ID NO: 66974 - RNA, 19 nt, synthetic construct
  misc_feature 1..19: note = siRNA sense sequence
  source 1..19: mol_type = other RNA
tgagggtccctggttggat

SEQ ID NO: 66975 - RNA, 19 nt, synthetic construct
  misc_feature 1..19: note = siRNA antisense sequence
  source 1..19: mol_type = other RNA
atccaaccagggaccctca

SEQ ID NO: 66976 - RNA, 19 nt, synthetic construct
  misc_feature 1..19: note = siRNA sense sequence
  source 1..19: mol_type = other RNA
gagggtccctggttggatt

SEQ ID NO: 66977 - RNA, 19 nt, synthetic construct
  misc_feature 1..19: note = siRNA antisense sequence
  source 1..19: mol_type = other RNA
aatccaaccagggaccctc

SEQ ID NO: 66978 - RNA, 19 nt, synthetic construct
  misc_feature 1..19: note = siRNA sense sequence
  source 1..19: mol_type = other RNA
tccctggttggattcagac

SEQ ID NO: 66979 - RNA, 19 nt, synthetic construct
  misc_feature 1..19: note = siRNA antisense sequence
  source 1..19: mol_type = other RNA
gtctgaatccaaccaggga

SEQ ID NO: 66980 - RNA, 19 nt, synthetic construct
  misc_feature 1..19: note = siRNA sense sequence
  source 1..19: mol_type = other RNA
cctggttggattcagactt

SEQ ID NO: 66981 - RNA, 19 nt, synthetic construct
  misc_feature 1..19: note = siRNA antisense sequence
  source 1..19: mol_type = other RNA
aagtctgaatccaaccagg

SEQ ID NO: 66982 - RNA, 19 nt, synthetic construct
  misc_feature 1..19: note = siRNA sense sequence
  source 1..19: mol_type = other RNA
gtagttccattatatcaag

SEQ ID NO: 66983 - RNA, 19 nt, synthetic construct
  misc_feature 1..19: note = siRNA antisense sequence
  source 1..19: mol_type = other RNA
cttgatataatggaactac

SEQ ID NO: 66984 - RNA, 19 nt, synthetic construct
  misc_feature 1..19: note = siRNA sense sequence
  source 1..19: mol_type = other RNA
gttccattatatcaagaag

SEQ ID NO: 66985 - RNA, 19 nt, synthetic construct
  misc_feature 1..19: note = siRNA antisense sequence
  source 1..19: mol_type = other RNA
cttcttgatataatggaac

SEQ ID NO: 66986 - RNA, 19 nt, synthetic construct
  misc_feature 1..19: note = siRNA sense sequence
  source 1..19: mol_type = other RNA
cattatatcaagaaggcta

SEQ ID NO: 66987 - RNA, 19 nt, synthetic construct
  misc_feature 1..19: note = siRNA antisense sequence
  source 1..19: mol_type = other RNA
tagccttcttgatataatg

SEQ ID NO: 66988 - RNA, 19 nt, synthetic construct
  misc_feature 1..19: note = siRNA sense sequence
  source 1..19: mol_type = other RNA
tatatcaagaaggctaatc

SEQ ID NO: 66989 - RNA, 19 nt, synthetic construct
  misc_feature 1..19: note = siRNA antisense sequence
  source 1..19: mol_type = other RNA
gattagccttcttgatata

SEQ ID NO: 66990 - RNA, 19 nt, synthetic construct
  misc_feature 1..19: note = siRNA sense sequence
  source 1..19: mol_type = other RNA
atatcaagaaggctaatcc

SEQ ID NO: 66991 - RNA, 19 nt, synthetic construct
  misc_feature 1..19: note = siRNA antisense sequence
  source 1..19: mol_type = other RNA
ggattagccttcttgatat

SEQ ID NO: 66992 - RNA, 19 nt, synthetic construct
  misc_feature 1..19: note = siRNA sense sequence
  source 1..19: mol_type = other RNA
tatcaagaaggctaatccc

SEQ ID NO: 66993 - RNA, 19 nt, synthetic construct
  misc_feature 1..19: note = siRNA antisense sequence
  source 1..19: mol_type = other RNA
gggattagccttcttgata

SEQ ID NO: 66994 - RNA, 19 nt, synthetic construct
  misc_feature 1..19: note = siRNA sense sequence
  source 1..19: mol_type = other RNA
aagaaggctaatcccactt

SEQ ID NO: 66995 - RNA, 19 nt, synthetic construct
  misc_feature 1..19: note = siRNA antisense sequence
  source 1..19: mol_type = other RNA
aagtgggattagccttctt

SEQ ID NO: 66996 - RNA, 19 nt, synthetic construct
  misc_feature 1..19: note = siRNA sense sequence
  source 1..19: mol_type = other RNA
aaggctaatcccacttccc

SEQ ID NO: 66997 - RNA, 19 nt, synthetic construct
  misc_feature 1..19: note = siRNA antisense sequence
  source 1..19: mol_type = other RNA
gggaagtgggattagcctt

SEQ ID NO: 66998 - RNA, 19 nt, synthetic construct
  misc_feature 1..19: note = siRNA sense sequence
  source 1..19: mol_type = other RNA
ccctactttaaagttctgt

SEQ ID NO: 66999 - RNA, 19 nt, synthetic construct
  misc_feature 1..19: note = siRNA antisense sequence
  source 1..19: mol_type = other RNA
acagaactttaaagtaggg

SEQ ID NO: 67000 - RNA, 19 nt, synthetic construct
  misc_feature 1..19: note = siRNA sense sequence
  source 1..19: mol_type = other RNA
cctactttaaagttctgtt

SEQ ID NO: 67001 - RNA, 19 nt, synthetic construct
  misc_feature 1..19: note = siRNA antisense sequence
  source 1..19: mol_type = other RNA
aacagaactttaaagtagg

SEQ ID NO: 67002 - RNA, 19 nt, synthetic construct
  misc_feature 1..19: note = siRNA sense sequence
  source 1..19: mol_type = other RNA
tactttaaagttctgttgg

SEQ ID NO: 67003 - RNA, 19 nt, synthetic construct
  misc_feature 1..19: note = siRNA antisense sequence
  source 1..19: mol_type = other RNA
ccaacagaactttaaagta

SEQ ID NO: 67004 - RNA, 19 nt, synthetic construct
  misc_feature 1..19: note = siRNA sense sequence
  source 1..19: mol_type = other RNA
actttaaagttctgttgga

SEQ ID NO: 67005 - RNA, 19 nt, synthetic construct
  misc_feature 1..19: note = siRNA antisense sequence
  source 1..19: mol_type = other RNA
tccaacagaactttaaagt

SEQ ID NO: 67006 - RNA, 19 nt, synthetic construct
  misc_feature 1..19: note = siRNA sense sequence
  source 1..19: mol_type = other RNA
ctttaaagttctgttggaa

SEQ ID NO: 67007 - RNA, 19 nt, synthetic construct
  misc_feature 1..19: note = siRNA antisense sequence
  source 1..19: mol_type = other RNA
ttccaacagaactttaaag

SEQ ID NO: 67008 - RNA, 19 nt, synthetic construct
  misc_feature 1..19: note = siRNA sense sequence
  source 1..19: mol_type = other RNA
tttaaagttctgttggaag

SEQ ID NO: 67009 - RNA, 19 nt, synthetic construct
  misc_feature 1..19: note = siRNA antisense sequence
  source 1..19: mol_type = other RNA
cttccaacagaactttaaa

SEQ ID NO: 67010 - RNA, 19 nt, synthetic construct
  misc_feature 1..19: note = siRNA sense sequence
  source 1..19: mol_type = other RNA
ttaaagttctgttggaagc

SEQ ID NO: 67011 - RNA, 19 nt, synthetic construct
  misc_feature 1..19: note = siRNA antisense sequence
  source 1..19: mol_type = other RNA
gcttccaacagaactttaa

SEQ ID NO: 67012 - RNA, 19 nt, synthetic construct
  misc_feature 1..19: note = siRNA sense sequence
  source 1..19: mol_type = other RNA
taaagttctgttggaagct

SEQ ID NO: 67013 - RNA, 19 nt, synthetic construct
  misc_feature 1..19: note = siRNA antisense sequence
  source 1..19: mol_type = other RNA
agcttccaacagaacttta

SEQ ID NO: 67014 - RNA, 19 nt, synthetic construct
  misc_feature 1..19: note = siRNA sense sequence
  source 1..19: mol_type = other RNA
aaagttctgttggaagctg

SEQ ID NO: 67015 - RNA, 19 nt, synthetic construct
  misc_feature 1..19: note = siRNA antisense sequence
  source 1..19: mol_type = other RNA
cagcttccaacagaacttt

SEQ ID NO: 67016 - RNA, 19 nt, synthetic construct
  misc_feature 1..19: note = siRNA sense sequence
  source 1..19: mol_type = other RNA
aagttctgttggaagctgc

SEQ ID NO: 67017 - RNA, 19 nt, synthetic construct
  misc_feature 1..19: note = siRNA antisense sequence
  source 1..19: mol_type = other RNA
gcagcttccaacagaactt

SEQ ID NO: 67018 - RNA, 19 nt, synthetic construct
  misc_feature 1..19: note = siRNA sense sequence
  source 1..19: mol_type = other RNA
agttctgttggaagctgcc

SEQ ID NO: 67019 - RNA, 19 nt, synthetic construct
  misc_feature 1..19: note = siRNA antisense sequence
  source 1..19: mol_type = other RNA
ggcagcttccaacagaact

SEQ ID NO: 67020 - RNA, 19 nt, synthetic construct
  misc_feature 1..19: note = siRNA sense sequence
  source 1..19: mol_type = other RNA
gttctgttggaagctgcct

SEQ ID NO: 67021 - RNA, 19 nt, synthetic construct
  misc_feature 1..19: note = siRNA antisense sequence
  source 1..19: mol_type = other RNA
aggcagcttccaacagaac

SEQ ID NO: 67022 - RNA, 19 nt, synthetic construct
  misc_feature 1..19: note = siRNA sense sequence
  source 1..19: mol_type = other RNA
ttctgttggaagctgcctg

SEQ ID NO: 67023 - RNA, 19 nt, synthetic construct
  misc_feature 1..19: note = siRNA antisense sequence
  source 1..19: mol_type = other RNA
caggcagcttccaacagaa

SEQ ID NO: 67024 - RNA, 19 nt, synthetic construct
  misc_feature 1..19: note = siRNA sense sequence
  source 1..19: mol_type = other RNA
tctgttggaagctgcctga

SEQ ID NO: 67025 - RNA, 19 nt, synthetic construct
  misc_feature 1..19: note = siRNA antisense sequence
  source 1..19: mol_type = other RNA
tcaggcagcttccaacaga

SEQ ID NO: 67026 - RNA, 19 nt, synthetic construct
  misc_feature 1..19: note = siRNA sense sequence
  source 1..19: mol_type = other RNA
tggaagctgcctgaagcat

SEQ ID NO: 67027 - RNA, 19 nt, synthetic construct
  misc_feature 1..19: note = siRNA antisense sequence
  source 1..19: mol_type = other RNA
atgcttcaggcagcttcca

SEQ ID NO: 67028 - RNA, 19 nt, synthetic construct
  misc_feature 1..19: note = siRNA sense sequence
  source 1..19: mol_type = other RNA
gaagctgcctgaagcatga

SEQ ID NO: 67029 - RNA, 19 nt, synthetic construct
  misc_feature 1..19: note = siRNA antisense sequence
  source 1..19: mol_type = other RNA
tcatgcttcaggcagcttc

SEQ ID NO: 67030 - RNA, 19 nt, synthetic construct
  misc_feature 1..19: note = siRNA sense sequence
  source 1..19: mol_type = other RNA
aagctgcctgaagcatgag

SEQ ID NO: 67031 - RNA, 19 nt, synthetic construct
  misc_feature 1..19: note = siRNA antisense sequence
  source 1..19: mol_type = other RNA
ctcatgcttcaggcagctt

SEQ ID NO: 67032 - RNA, 19 nt, synthetic construct
  misc_feature 1..19: note = siRNA sense sequence
  source 1..19: mol_type = other RNA
agctgcctgaagcatgagt

SEQ ID NO: 67033 - RNA, 19 nt, synthetic construct
  misc_feature 1..19: note = siRNA antisense sequence
  source 1..19: mol_type = other RNA
actcatgcttcaggcagct

SEQ ID NO: 67034 - RNA, 19 nt, synthetic construct
  misc_feature 1..19: note = siRNA sense sequence
  source 1..19: mol_type = other RNA
gctgcctgaagcatgagtt

SEQ ID NO: 67035 - RNA, 19 nt, synthetic construct
  misc_feature 1..19: note = siRNA antisense sequence
  source 1..19: mol_type = other RNA
aactcatgcttcaggcagc

SEQ ID NO: 67036 - RNA, 19 nt, synthetic construct
  misc_feature 1..19: note = siRNA sense sequence
  source 1..19: mol_type = other RNA
ctgcctgaagcatgagttc

SEQ ID NO: 67037 - RNA, 19 nt, synthetic construct
  misc_feature 1..19: note = siRNA antisense sequence
  source 1..19: mol_type = other RNA
gaactcatgcttcaggcag

SEQ ID NO: 67038 - RNA, 19 nt, synthetic construct
  misc_feature 1..19: note = siRNA sense sequence
  source 1..19: mol_type = other RNA
gaagcatgagttcagttgc

SEQ ID NO: 67039 - RNA, 19 nt, synthetic construct
  misc_feature 1..19: note = siRNA antisense sequence
  source 1..19: mol_type = other RNA
gcaactgaactcatgcttc

SEQ ID NO: 67040 - RNA, 19 nt, synthetic construct
  misc_feature 1..19: note = siRNA sense sequence
  source 1..19: mol_type = other RNA
aagcatgagttcagttgca

SEQ ID NO: 67041 - RNA, 19 nt, synthetic construct
  misc_feature 1..19: note = siRNA antisense sequence
  source 1..19: mol_type = other RNA
tgcaactgaactcatgctt

SEQ ID NO: 67042 - RNA, 19 nt, synthetic construct
  misc_feature 1..19: note = siRNA sense sequence
  source 1..19: mol_type = other RNA
agcatgagttcagttgcag

SEQ ID NO: 67043 - RNA, 19 nt, synthetic construct
  misc_feature 1..19: note = siRNA antisense sequence
  source 1..19: mol_type = other RNA
ctgcaactgaactcatgct

SEQ ID NO: 67044 - RNA, 19 nt, synthetic construct
  misc_feature 1..19: note = siRNA sense sequence
  source 1..19: mol_type = other RNA
tgagttcagttgcagtagg

SEQ ID NO: 67045 - RNA, 19 nt, synthetic construct
  misc_feature 1..19: note = siRNA antisense sequence
  source 1..19: mol_type = other RNA
cctactgcaactgaactca

SEQ ID NO: 67046 - RNA, 19 nt, synthetic construct
  misc_feature 1..19: note = siRNA sense sequence
  source 1..19: mol_type = other RNA
gagttcagttgcagtaggt

SEQ ID NO: 67047 - RNA, 19 nt, synthetic construct
  misc_feature 1..19: note = siRNA antisense sequence
  source 1..19: mol_type = other RNA
acctactgcaactgaactc

SEQ ID NO: 67048 - RNA, 19 nt, synthetic construct
  misc_feature 1..19: note = siRNA sense sequence
  source 1..19: mol_type = other RNA
agttcagttgcagtaggtt

SEQ ID NO: 67049 - RNA, 19 nt, synthetic construct
  misc_feature 1..19: note = siRNA antisense sequence
  source 1..19: mol_type = other RNA
aacctactgcaactgaact

SEQ ID NO: 67050 - RNA, 19 nt, synthetic construct
  misc_feature 1..19: note = siRNA sense sequence
  source 1..19: mol_type = other RNA
gttcagttgcagtaggttc

SEQ ID NO: 67051 - RNA, 19 nt, synthetic construct
  misc_feature 1..19: note = siRNA antisense sequence
  source 1..19: mol_type = other RNA
gaacctactgcaactgaac

SEQ ID NO: 67052 - RNA, 19 nt, synthetic construct
  misc_feature 1..19: note = siRNA sense sequence
  source 1..19: mol_type = other RNA
ttcagttgcagtaggttca

SEQ ID NO: 67053 - RNA, 19 nt, synthetic construct
  misc_feature 1..19: note = siRNA antisense sequence
  source 1..19: mol_type = other RNA
tgaacctactgcaactgaa

SEQ ID NO: 67054 - RNA, 19 nt, synthetic construct
  misc_feature 1..19: note = siRNA sense sequence
  source 1..19: mol_type = other RNA
tcagttgcagtaggttcag

SEQ ID NO: 67055 - RNA, 19 nt, synthetic construct
  misc_feature 1..19: note = siRNA antisense sequence
  source 1..19: mol_type = other RNA
ctgaacctactgcaactga

SEQ ID NO: 67056 - RNA, 19 nt, synthetic construct
  misc_feature 1..19: note = siRNA sense sequence
  source 1..19: mol_type = other RNA
cagttgcagtaggttcaga

SEQ ID NO: 67057 - RNA, 19 nt, synthetic construct
  misc_feature 1..19: note = siRNA antisense sequence
  source 1..19: mol_type = other RNA
tctgaacctactgcaactg

SEQ ID NO: 67058 - RNA, 19 nt, synthetic construct
  misc_feature 1..19: note = siRNA sense sequence
  source 1..19: mol_type = other RNA
agttgcagtaggttcagaa

SEQ ID NO: 67059 - RNA, 19 nt, synthetic construct
  misc_feature 1..19: note = siRNA antisense sequence
  source 1..19: mol_type = other RNA
ttctgaacctactgcaact

SEQ ID NO: 67060 - RNA, 19 nt, synthetic construct
  misc_feature 1..19: note = siRNA sense sequence
  source 1..19: mol_type = other RNA
tgcagtaggttcagaagag

SEQ ID NO: 67061 - RNA, 19 nt, synthetic construct
  misc_feature 1..19: note = siRNA antisense sequence
  source 1..19: mol_type = other RNA
ctcttctgaacctactgca

SEQ ID NO: 67062 - RNA, 19 nt, synthetic construct
  misc_feature 1..19: note = siRNA sense sequence
  source 1..19: mol_type = other RNA
gcagtaggttcagaagagc

SEQ ID NO: 67063 - RNA, 19 nt, synthetic construct
  misc_feature 1..19: note = siRNA antisense sequence
  source 1..19: mol_type = other RNA
gctcttctgaacctactgc

SEQ ID NO: 67064 - RNA, 19 nt, synthetic construct
  misc_feature 1..19: note = siRNA sense sequence
  source 1..19: mol_type = other RNA
cagtaggttcagaagagct

SEQ ID NO: 67065 - RNA, 19 nt, synthetic construct
  misc_feature 1..19: note = siRNA antisense sequence
  source 1..19: mol_type = other RNA
agctcttctgaacctactg

SEQ ID NO: 67066 - RNA, 19 nt, synthetic construct
  misc_feature 1..19: note = siRNA sense sequence
  source 1..19: mol_type = other RNA
agtaggttcagaagagcta

SEQ ID NO: 67067 - RNA, 19 nt, synthetic construct
  misc_feature 1..19: note = siRNA antisense sequence
  source 1..19: mol_type = other RNA
tagctcttctgaacctact

SEQ ID NO: 67068 - RNA, 19 nt, synthetic construct
  misc_feature 1..19: note = siRNA sense sequence
  source 1..19: mol_type = other RNA
taggttcagaagagctact

SEQ ID NO: 67069 - RNA, 19 nt, synthetic construct
  misc_feature 1..19: note = siRNA antisense sequence
  source 1..19: mol_type = other RNA
agtagctcttctgaaccta

SEQ ID NO: 67070 - RNA, 19 nt, synthetic construct
  misc_feature 1..19: note = siRNA sense sequence
  source 1..19: mol_type = other RNA
aggttcagaagagctactc

SEQ ID NO: 67071 - RNA, 19 nt, synthetic construct
  misc_feature 1..19: note = siRNA antisense sequence
  source 1..19: mol_type = other RNA
gagtagctcttctgaacct

SEQ ID NO: 67072 - RNA, 19 nt, synthetic construct
  misc_feature 1..19: note = siRNA sense sequence
  source 1..19: mol_type = other RNA
gctactcttatcccagaca

SEQ ID NO: 67073 - RNA, 19 nt, synthetic construct
  misc_feature 1..19: note = siRNA antisense sequence
  source 1..19: mol_type = other RNA
tgtctgggataagagtagc

SEQ ID NO: 67074 - RNA, 19 nt, synthetic construct
  misc_feature 1..19: note = siRNA sense sequence
  source 1..19: mol_type = other RNA
tcttatcccagacatcttt

SEQ ID NO: 67075 - RNA, 19 nt, synthetic construct
  misc_feature 1..19: note = siRNA antisense sequence
  source 1..19: mol_type = other RNA
aaagatgtctgggataaga

SEQ ID NO: 67076 - RNA, 19 nt, synthetic construct
  misc_feature 1..19: note = siRNA sense sequence
  source 1..19: mol_type = other RNA
cttatcccagacatctttt

SEQ ID NO: 67077 - RNA, 19 nt, synthetic construct
  misc_feature 1..19: note = siRNA antisense sequence
  source 1..19: mol_type = other RNA
aaaagatgtctgggataag

SEQ ID NO: 67078 - RNA, 19 nt, synthetic construct
  misc_feature 1..19: note = siRNA sense sequence
  source 1..19: mol_type = other RNA
ctggatcagacacctcagg

SEQ ID NO: 67079 - RNA, 19 nt, synthetic construct
  misc_feature 1..19: note = siRNA antisense sequence
  source 1..19: mol_type = other RNA
cctgaggtgtctgatccag

SEQ ID NO: 67080 - RNA, 19 nt, synthetic construct
  misc_feature 1..19: note = siRNA sense sequence
  source 1..19: mol_type = other RNA
atcagacacctcaggacta

SEQ ID NO: 67081 - RNA, 19 nt, synthetic construct
  misc_feature 1..19: note = siRNA antisense sequence
  source 1..19: mol_type = other RNA
tagtcctgaggtgtctgat

SEQ ID NO: 67082 - RNA, 19 nt, synthetic construct
  misc_feature 1..19: note = siRNA sense sequence
  source 1..19: mol_type = other RNA
tcagacacctcaggactat

SEQ ID NO: 67083 - RNA, 19 nt, synthetic construct
  misc_feature 1..19: note = siRNA antisense sequence
  source 1..19: mol_type = other RNA
atagtcctgaggtgtctga

SEQ ID NO: 67084 - RNA, 19 nt, synthetic construct
  misc_feature 1..19: note = siRNA sense sequence
  source 1..19: mol_type = other RNA
cagacacctcaggactatc

SEQ ID NO: 67085 - RNA, 19 nt, synthetic construct
  misc_feature 1..19: note = siRNA antisense sequence
  source 1..19: mol_type = other RNA
gatagtcctgaggtgtctg

SEQ ID NO: 67086 - RNA, 19 nt, synthetic construct
  misc_feature 1..19: note = siRNA sense sequence
  source 1..19: mol_type = other RNA
agacacctcaggactatcc

SEQ ID NO: 67087 - RNA, 19 nt, synthetic construct
  misc_feature 1..19: note = siRNA antisense sequence
  source 1..19: mol_type = other RNA
ggatagtcctgaggtgtct

SEQ ID NO: 67088 - RNA, 19 nt, synthetic construct
  misc_feature 1..19: note = siRNA sense sequence
  source 1..19: mol_type = other RNA
gacacctcaggactatccc

SEQ ID NO: 67089 - RNA, 19 nt, synthetic construct
  misc_feature 1..19: note = siRNA antisense sequence
  source 1..19: mol_type = other RNA
gggatagtcctgaggtgtc

SEQ ID NO: 67090 - RNA, 19 nt, synthetic construct
  misc_feature 1..19: note = siRNA sense sequence
  source 1..19: mol_type = other RNA
cctcaggactatcccttct

SEQ ID NO: 67091 - RNA, 19 nt, synthetic construct
  misc_feature 1..19: note = siRNA antisense sequence
  source 1..19: mol_type = other RNA
agaagggatagtcctgagg

SEQ ID NO: 67092 - RNA, 19 nt, synthetic construct
  misc_feature 1..19: note = siRNA sense sequence
  source 1..19: mol_type = other RNA
ctcaggactatcccttctt

SEQ ID NO: 67093 - RNA, 19 nt, synthetic construct
  misc_feature 1..19: note = siRNA antisense sequence
  source 1..19: mol_type = other RNA
aagaagggatagtcctgag

SEQ ID NO: 67094 - RNA, 19 nt, synthetic construct
  misc_feature 1..19: note = siRNA sense sequence
  source 1..19: mol_type = other RNA
tcaggactatcccttcttc

SEQ ID NO: 67095 - RNA, 19 nt, synthetic construct
  misc_feature 1..19: note = siRNA antisense sequence
  source 1..19: mol_type = other RNA
gaagaagggatagtcctga

SEQ ID NO: 67096 - RNA, 19 nt, synthetic construct
  misc_feature 1..19: note = siRNA sense sequence
  source 1..19: mol_type = other RNA
gactatcccttcttccttc

SEQ ID NO: 67097 - RNA, 19 nt, synthetic construct
  misc_feature 1..19: note = siRNA antisense sequence
  source 1..19: mol_type = other RNA
gaaggaagaagggatagtc

SEQ ID NO: 67098 - RNA, 19 nt, synthetic construct
  misc_feature 1..19: note = siRNA sense sequence
  source 1..19: mol_type = other RNA
actatcccttcttccttcc

SEQ ID NO: 67099 - RNA, 19 nt, synthetic construct
  misc_feature 1..19: note = siRNA antisense sequence
  source 1..19: mol_type = other RNA
ggaaggaagaagggatagt

SEQ ID NO: 67100 - RNA, 19 nt, synthetic construct
  misc_feature 1..19: note = siRNA sense sequence
  source 1..19: mol_type = other RNA
accagtttggagttcattg

SEQ ID NO: 67101 - RNA, 19 nt, synthetic construct
  misc_feature 1..19: note = siRNA antisense sequence
  source 1..19: mol_type = other RNA
caatgaactccaaactggt

SEQ ID NO: 67102 - RNA, 19 nt, synthetic construct
  misc_feature 1..19: note = siRNA sense sequence
  source 1..19: mol_type = other RNA
ccagtttggagttcattgg

SEQ ID NO: 67103 - RNA, 19 nt, synthetic construct
  misc_feature 1..19: note = siRNA antisense sequence
  source 1..19: mol_type = other RNA
ccaatgaactccaaactgg

SEQ ID NO: 67104 - RNA, 19 nt, synthetic construct
  misc_feature 1..19: note = siRNA sense sequence
  source 1..19: mol_type = other RNA
cagtttggagttcattgga

SEQ ID NO: 67105 - RNA, 19 nt, synthetic construct
  misc_feature 1..19: note = siRNA antisense sequence
  source 1..19: mol_type = other RNA
tccaatgaactccaaactg

SEQ ID NO: 67106 - RNA, 19 nt, synthetic construct
  misc_feature 1..19: note = siRNA sense sequence
  source 1..19: mol_type = other RNA
agtttggagttcattggaa

SEQ ID NO: 67107 - RNA, 19 nt, synthetic construct
  misc_feature 1..19: note = siRNA antisense sequence
  source 1..19: mol_type = other RNA
ttccaatgaactccaaact

SEQ ID NO: 67108 - RNA, 19 nt, synthetic construct
  misc_feature 1..19: note = siRNA sense sequence
  source 1..19: mol_type = other RNA
agacaggccaaaagtttct

SEQ ID NO: 67109 - RNA, 19 nt, synthetic construct
  misc_feature 1..19: note = siRNA antisense sequence
  source 1..19: mol_type = other RNA
agaaacttttggcctgtct

SEQ ID NO: 67110 - RNA, 19 nt, synthetic construct
  misc_feature 1..19: note = siRNA sense sequence
  source 1..19: mol_type = other RNA
ggccaaaagtttctcttag

SEQ ID NO: 67111 - RNA, 19 nt, synthetic construct
  misc_feature 1..19: note = siRNA antisense sequence
  source 1..19: mol_type = other RNA
ctaagagaaacttttggcc

SEQ ID NO: 67112 - RNA, 19 nt, synthetic construct
  misc_feature 1..19: note = siRNA sense sequence
  source 1..19: mol_type = other RNA
gccaaaagtttctcttaga

SEQ ID NO: 67113 - RNA, 19 nt, synthetic construct
  misc_feature 1..19: note = siRNA antisense sequence
  source 1..19: mol_type = other RNA
tctaagagaaacttttggc

SEQ ID NO: 67114 - RNA, 19 nt, synthetic construct
  misc_feature 1..19: note = siRNA sense sequence
  source 1..19: mol_type = other RNA
ccaaaagtttctcttagag

SEQ ID NO: 67115 - RNA, 19 nt, synthetic construct
  misc_feature 1..19: note = siRNA antisense sequence
  source 1..19: mol_type = other RNA
ctctaagagaaacttttgg

SEQ ID NO: 67116 - RNA, 19 nt, synthetic construct
  misc_feature 1..19: note = siRNA sense sequence
  source 1..19: mol_type = other RNA
aaagtttctcttagagcag

SEQ ID NO: 67117 - RNA, 19 nt, synthetic construct
  misc_feature 1..19: note = siRNA antisense sequence
  source 1..19: mol_type = other RNA
ctgctctaagagaaacttt

SEQ ID NO: 67118 - RNA, 19 nt, synthetic construct
  misc_feature 1..19: note = siRNA sense sequence
  source 1..19: mol_type = other RNA
aagtttctcttagagcaga

SEQ ID NO: 67119 - RNA, 19 nt, synthetic construct
  misc_feature 1..19: note = siRNA antisense sequence
  source 1..19: mol_type = other RNA
tctgctctaagagaaactt

SEQ ID NO: 67120 - RNA, 19 nt, synthetic construct
  misc_feature 1..19: note = siRNA sense sequence
  source 1..19: mol_type = other RNA
gattcactttcaaaagaca

SEQ ID NO: 67121 - RNA, 19 nt, synthetic construct
  misc_feature 1..19: note = siRNA antisense sequence
  source 1..19: mol_type = other RNA
tgtcttttgaaagtgaatc

SEQ ID NO: 67122 - RNA, 19 nt, synthetic construct
  misc_feature 1..19: note = siRNA sense sequence
  source 1..19: mol_type = other RNA
attcactttcaaaagacac

SEQ ID NO: 67123 - RNA, 19 nt, synthetic construct
  misc_feature 1..19: note = siRNA antisense sequence
  source 1..19: mol_type = other RNA
gtgtcttttgaaagtgaat

SEQ ID NO: 67124 - RNA, 19 nt, synthetic construct
  misc_feature 1..19: note = siRNA sense sequence
  source 1..19: mol_type = other RNA
cacagtctttatatctttg

SEQ ID NO: 67125 - RNA, 19 nt, synthetic construct
  misc_feature 1..19: note = siRNA antisense sequence
  source 1..19: mol_type = other RNA
caaagatataaagactgtg

SEQ ID NO: 67126 - RNA, 19 nt, synthetic construct
  misc_feature 1..19: note = siRNA sense sequence
  source 1..19: mol_type = other RNA
atctttgtcttcatcatac

SEQ ID NO: 67127 - RNA, 19 nt, synthetic construct
  misc_feature 1..19: note = siRNA antisense sequence
  source 1..19: mol_type = other RNA
gtatgatgaagacaaagat

SEQ ID NO: 67128 - RNA, 19 nt, synthetic construct
  misc_feature 1..19: note = siRNA sense sequence
  source 1..19: mol_type = other RNA
agtgttagtagctgcttaa

SEQ ID NO: 67129 - RNA, 19 nt, synthetic construct
  misc_feature 1..19: note = siRNA antisense sequence
  source 1..19: mol_type = other RNA
ttaagcagctactaacact

SEQ ID NO: 67130 - RNA, 19 nt, synthetic construct
  misc_feature 1..19: note = siRNA sense sequence
  source 1..19: mol_type = other RNA
gtgttagtagctgcttaat

SEQ ID NO: 67131 - RNA, 19 nt, synthetic construct
  misc_feature 1..19: note = siRNA antisense sequence
  source 1..19: mol_type = other RNA
attaagcagctactaacac

SEQ ID NO: 67132 - RNA, 19 nt, synthetic construct
  misc_feature 1..19: note = siRNA sense sequence
  source 1..19: mol_type = other RNA
tagctgcttaatacacttc

SEQ ID NO: 67133 - RNA, 19 nt, synthetic construct
  misc_feature 1..19: note = siRNA antisense sequence
  source 1..19: mol_type = other RNA
gaagtgtattaagcagcta

SEQ ID NO: 67134 - RNA, 19 nt, synthetic construct
  misc_feature 1..19: note = siRNA sense sequence
  source 1..19: mol_type = other RNA
gctgcttaatacacttcat

SEQ ID NO: 67135 - RNA, 19 nt, synthetic construct
  misc_feature 1..19: note = siRNA antisense sequence
  source 1..19: mol_type = other RNA
atgaagtgtattaagcagc

SEQ ID NO: 67136 - RNA, 19 nt, synthetic construct
  misc_feature 1..19: note = siRNA sense sequence
  source 1..19: mol_type = other RNA
ctgcttaatacacttcatg

SEQ ID NO: 67137 - RNA, 19 nt, synthetic construct
  misc_feature 1..19: note = siRNA antisense sequence
  source 1..19: mol_type = other RNA
catgaagtgtattaagcag

SEQ ID NO: 67138 - RNA, 19 nt, synthetic construct
  misc_feature 1..19: note = siRNA sense sequence
  source 1..19: mol_type = other RNA
tacacttcatgattgatgg

SEQ ID NO: 67139 - RNA, 19 nt, synthetic construct
  misc_feature 1..19: note = siRNA antisense sequence
  source 1..19: mol_type = other RNA
ccatcaatcatgaagtgta

SEQ ID NO: 67140 - RNA, 19 nt, synthetic construct
  misc_feature 1..19: note = siRNA sense sequence
  source 1..19: mol_type = other RNA
acacttcatgattgatggg

SEQ ID NO: 67141 - RNA, 19 nt, synthetic construct
  misc_feature 1..19: note = siRNA antisense sequence
  source 1..19: mol_type = other RNA
cccatcaatcatgaagtgt

SEQ ID NO: 67142 - RNA, 19 nt, synthetic construct
  misc_feature 1..19: note = siRNA sense sequence
  source 1..19: mol_type = other RNA
cacttcatgattgatggga

SEQ ID NO: 67143 - RNA, 19 nt, synthetic construct
  misc_feature 1..19: note = siRNA antisense sequence
  source 1..19: mol_type = other RNA
tcccatcaatcatgaagtg

SEQ ID NO: 67144 - RNA, 19 nt, synthetic construct
  misc_feature 1..19: note = siRNA sense sequence
  source 1..19: mol_type = other RNA
attgatgggaggaatcttg

SEQ ID NO: 67145 - RNA, 19 nt, synthetic construct
  misc_feature 1..19: note = siRNA antisense sequence
  source 1..19: mol_type = other RNA
caagattcctcccatcaat

SEQ ID NO: 67146 - RNA, 19 nt, synthetic construct
  misc_feature 1..19: note = siRNA sense sequence
  source 1..19: mol_type = other RNA
ttgatgggaggaatcttgt

SEQ ID NO: 67147 - RNA, 19 nt, synthetic construct
  misc_feature 1..19: note = siRNA antisense sequence
  source 1..19: mol_type = other RNA
acaagattcctcccatcaa

SEQ ID NO: 67148 - RNA, 19 nt, synthetic construct
  misc_feature 1..19: note = siRNA sense sequence
  source 1..19: mol_type = other RNA
tgatgggaggaatcttgta

SEQ ID NO: 67149 - RNA, 19 nt, synthetic construct
  misc_feature 1..19: note = siRNA antisense sequence
  source 1..19: mol_type = other RNA
tacaagattcctcccatca

SEQ ID NO: 67150 - RNA, 19 nt, synthetic construct
  misc_feature 1..19: note = siRNA sense sequence
  source 1..19: mol_type = other RNA
gatgggaggaatcttgtag

SEQ ID NO: 67151 - RNA, 19 nt, synthetic construct
  misc_feature 1..19: note = siRNA antisense sequence
  source 1..19: mol_type = other RNA
ctacaagattcctcccatc

SEQ ID NO: 67152 - RNA, 19 nt, synthetic construct
  misc_feature 1..19: note = siRNA sense sequence
  source 1..19: mol_type = other RNA
atgggaggaatcttgtagg

SEQ ID NO: 67153 - RNA, 19 nt, synthetic construct
  misc_feature 1..19: note = siRNA antisense sequence
  source 1..19: mol_type = other RNA
cctacaagattcctcccat

SEQ ID NO: 67154 - RNA, 19 nt, synthetic construct
  misc_feature 1..19: note = siRNA sense sequence
  source 1..19: mol_type = other RNA
tgggaggaatcttgtaggg

SEQ ID NO: 67155 - RNA, 19 nt, synthetic construct
  misc_feature 1..19: note = siRNA antisense sequence
  source 1..19: mol_type = other RNA
ccctacaagattcctccca

SEQ ID NO: 67156 - RNA, 19 nt, synthetic construct
  misc_feature 1..19: note = siRNA sense sequence
  source 1..19: mol_type = other RNA
acgtaggtttaaataggtg

SEQ ID NO: 67157 - RNA, 19 nt, synthetic construct
  misc_feature 1..19: note = siRNA antisense sequence
  source 1..19: mol_type = other RNA
cacctatttaaacctacgt

SEQ ID NO: 67158 - RNA, 19 nt, synthetic construct
  misc_feature 1..19: note = siRNA sense sequence
  source 1..19: mol_type = other RNA
cgtaggtttaaataggtgg

SEQ ID NO: 67159 - RNA, 19 nt, synthetic construct
  misc_feature 1..19: note = siRNA antisense sequence
  source 1..19: mol_type = other RNA
ccacctatttaaacctacg

SEQ ID NO: 67160 - RNA, 19 nt, synthetic construct
  misc_feature 1..19: note = siRNA sense sequence
  source 1..19: mol_type = other RNA
gtaggtttaaataggtgga

SEQ ID NO: 67161 - RNA, 19 nt, synthetic construct
  misc_feature 1..19: note = siRNA antisense sequence
  source 1..19: mol_type = other RNA
tccacctatttaaacctac

SEQ ID NO: 67162 - RNA, 19 nt, synthetic construct
  misc_feature 1..19: note = siRNA sense sequence
  source 1..19: mol_type = other RNA
taggtttaaataggtggag

SEQ ID NO: 67163 - RNA, 19 nt, synthetic construct
  misc_feature 1..19: note = siRNA antisense sequence
  source 1..19: mol_type = other RNA
ctccacctatttaaaccta

SEQ ID NO: 67164 - RNA, 19 nt, synthetic construct
  misc_feature 1..19: note = siRNA sense sequence
  source 1..19: mol_type = other RNA
agatgccagcacaccagga

SEQ ID NO: 67165 - RNA, 19 nt, synthetic construct
  misc_feature 1..19: note = siRNA antisense sequence
  source 1..19: mol_type = other RNA
tcctggtgtgctggcatct

SEQ ID NO: 67166 - RNA, 19 nt, synthetic construct
  misc_feature 1..19: note = siRNA sense sequence
  source 1..19: mol_type = other RNA
gatgccagcacaccaggag

SEQ ID NO: 67167 - RNA, 19 nt, synthetic construct
  misc_feature 1..19: note = siRNA antisense sequence
  source 1..19: mol_type = other RNA
ctcctggtgtgctggcatc

SEQ ID NO: 67168 - RNA, 19 nt, synthetic construct
  misc_feature 1..19: note = siRNA sense sequence
  source 1..19: mol_type = other RNA
atgccagcacaccaggagc

SEQ ID NO: 67169 - RNA, 19 nt, synthetic construct
  misc_feature 1..19: note = siRNA antisense sequence
  source 1..19: mol_type = other RNA
gctcctggtgtgctggcat

SEQ ID NO: 67170 - RNA, 19 nt, synthetic construct
  misc_feature 1..19: note = siRNA sense sequence
  source 1..19: mol_type = other RNA
acattcctctctcctaact

SEQ ID NO: 67171 - RNA, 19 nt, synthetic construct
  misc_feature 1..19: note = siRNA antisense sequence
  source 1..19: mol_type = other RNA
agttaggagagaggaatgt

SEQ ID NO: 67172 - RNA, 19 nt, synthetic construct
  misc_feature 1..19: note = siRNA sense sequence
  source 1..19: mol_type = other RNA
attcctctctcctaacttg

SEQ ID NO: 67173 - RNA, 19 nt, synthetic construct
  misc_feature 1..19: note = siRNA antisense sequence
  source 1..19: mol_type = other RNA
caagttaggagagaggaat

SEQ ID NO: 67174 - RNA, 19 nt, synthetic construct
  misc_feature 1..19: note = siRNA sense sequence
  source 1..19: mol_type = other RNA
ctctctcctaacttgatgt

SEQ ID NO: 67175 - RNA, 19 nt, synthetic construct
  misc_feature 1..19: note = siRNA antisense sequence
  source 1..19: mol_type = other RNA
acatcaagttaggagagag

SEQ ID NO: 67176 - RNA, 19 nt, synthetic construct
  misc_feature 1..19: note = siRNA sense sequence
  source 1..19: mol_type = other RNA
tctctcctaacttgatgtc

SEQ ID NO: 67177 - RNA, 19 nt, synthetic construct
  misc_feature 1..19: note = siRNA antisense sequence
  source 1..19: mol_type = other RNA
gacatcaagttaggagaga

SEQ ID NO: 67178 - RNA, 19 nt, synthetic construct
  misc_feature 1..19: note = siRNA sense sequence
  source 1..19: mol_type = other RNA
ctctcctaacttgatgtca

SEQ ID NO: 67179 - RNA, 19 nt, synthetic construct
  misc_feature 1..19: note = siRNA antisense sequence
  source 1..19: mol_type = other RNA
tgacatcaagttaggagag

SEQ ID NO: 67180 - RNA, 19 nt, synthetic construct
  misc_feature 1..19: note = siRNA sense sequence
  source 1..19: mol_type = other RNA
cctaacttgatgtcataat

SEQ ID NO: 67181 - RNA, 19 nt, synthetic construct
  misc_feature 1..19: note = siRNA antisense sequence
  source 1..19: mol_type = other RNA
attatgacatcaagttagg

SEQ ID NO: 67182 - RNA, 19 nt, synthetic construct
  misc_feature 1..19: note = siRNA sense sequence
  source 1..19: mol_type = other RNA
ctaacttgatgtcataatg

SEQ ID NO: 67183 - RNA, 19 nt, synthetic construct
  misc_feature 1..19: note = siRNA antisense sequence
  source 1..19: mol_type = other RNA
cattatgacatcaagttag

SEQ ID NO: 67184 - RNA, 19 nt, synthetic construct
  misc_feature 1..19: note = siRNA sense sequence
  source 1..19: mol_type = other RNA
acttgatgtcataatgatg

SEQ ID NO: 67185 - RNA, 19 nt, synthetic construct
  misc_feature 1..19: note = siRNA antisense sequence
  source 1..19: mol_type = other RNA
catcattatgacatcaagt

SEQ ID NO: 67186 - RNA, 19 nt, synthetic construct
  misc_feature 1..19: note = siRNA sense sequence
  source 1..19: mol_type = other RNA
cttgatgtcataatgatgc

SEQ ID NO: 67187 - RNA, 19 nt, synthetic construct
  misc_feature 1..19: note = siRNA antisense sequence
  source 1..19: mol_type = other RNA
gcatcattatgacatcaag

SEQ ID NO: 67188 - RNA, 19 nt, synthetic construct
  misc_feature 1..19: note = siRNA sense sequence
  source 1..19: mol_type = other RNA
ttgatgtcataatgatgcc

SEQ ID NO: 67189 - RNA, 19 nt, synthetic construct
  misc_feature 1..19: note = siRNA antisense sequence
  source 1..19: mol_type = other RNA
ggcatcattatgacatcaa

SEQ ID NO: 67190 - RNA, 19 nt, synthetic construct
  misc_feature 1..19: note = siRNA sense sequence
  source 1..19: mol_type = other RNA
gatgtcataatgatgcctg

SEQ ID NO: 67191 - RNA, 19 nt, synthetic construct
  misc_feature 1..19: note = siRNA antisense sequence
  source 1..19: mol_type = other RNA
caggcatcattatgacatc

SEQ ID NO: 67192 - RNA, 19 nt, synthetic construct
  misc_feature 1..19: note = siRNA sense sequence
  source 1..19: mol_type = other RNA
atgtcataatgatgcctga

SEQ ID NO: 67193 - RNA, 19 nt, synthetic construct
  misc_feature 1..19: note = siRNA antisense sequence
  source 1..19: mol_type = other RNA
tcaggcatcattatgacat

SEQ ID NO: 67194 - RNA, 19 nt, synthetic construct
  misc_feature 1..19: note = siRNA sense sequence
  source 1..19: mol_type = other RNA
tgtcataatgatgcctgaa

SEQ ID NO: 67195 - RNA, 19 nt, synthetic construct
  misc_feature 1..19: note = siRNA antisense sequence
  source 1..19: mol_type = other RNA
ttcaggcatcattatgaca

SEQ ID NO: 67196 - RNA, 19 nt, synthetic construct
  misc_feature 1..19: note = siRNA sense sequence
  source 1..19: mol_type = other RNA
gtcataatgatgcctgaag

SEQ ID NO: 67197 - RNA, 19 nt, synthetic construct
  misc_feature 1..19: note = siRNA antisense sequence
  source 1..19: mol_type = other RNA
cttcaggcatcattatgac

SEQ ID NO: 67198 - RNA, 19 nt, synthetic construct
  misc_feature 1..19: note = siRNA sense sequence
  source 1..19: mol_type = other RNA
tcataatgatgcctgaagt

SEQ ID NO: 67199 - RNA, 19 nt, synthetic construct
  misc_feature 1..19: note = siRNA antisense sequence
  source 1..19: mol_type = other RNA
acttcaggcatcattatga

SEQ ID NO: 67200 - RNA, 19 nt, synthetic construct
  misc_feature 1..19: note = siRNA sense sequence
  source 1..19: mol_type = other RNA
cataatgatgcctgaagtt

SEQ ID NO: 67201 - RNA, 19 nt, synthetic construct
  misc_feature 1..19: note = siRNA antisense sequence
  source 1..19: mol_type = other RNA
aacttcaggcatcattatg

SEQ ID NO: 67202 - RNA, 19 nt, synthetic construct
  misc_feature 1..19: note = siRNA sense sequence
  source 1..19: mol_type = other RNA
ataatgatgcctgaagttc

SEQ ID NO: 67203 - RNA, 19 nt, synthetic construct
  misc_feature 1..19: note = siRNA antisense sequence
  source 1..19: mol_type = other RNA
gaacttcaggcatcattat

SEQ ID NO: 67204 - RNA, 19 nt, synthetic construct
  misc_feature 1..19: note = siRNA sense sequence
  source 1..19: mol_type = other RNA
taatgatgcctgaagttcc

SEQ ID NO: 67205 - RNA, 19 nt, synthetic construct
  misc_feature 1..19: note = siRNA antisense sequence
  source 1..19: mol_type = other RNA
ggaacttcaggcatcatta

SEQ ID NO: 67206 - RNA, 19 nt, synthetic construct
  misc_feature 1..19: note = siRNA sense sequence
  source 1..19: mol_type = other RNA
aatgatgcctgaagttcct

SEQ ID NO: 67207 - RNA, 19 nt, synthetic construct
  misc_feature 1..19: note = siRNA antisense sequence
  source 1..19: mol_type = other RNA
aggaacttcaggcatcatt

SEQ ID NO: 67208 - RNA, 19 nt, synthetic construct
  misc_feature 1..19: note = siRNA sense sequence
  source 1..19: mol_type = other RNA
cctcaactgatgatttatt

SEQ ID NO: 67209 - RNA, 19 nt, synthetic construct
  misc_feature 1..19: note = siRNA antisense sequence
  source 1..19: mol_type = other RNA
aataaatcatcagttgagg

SEQ ID NO: 67210 - RNA, 19 nt, synthetic construct
  misc_feature 1..19: note = siRNA sense sequence
  source 1..19: mol_type = other RNA
aaagctttattcttcatcc

SEQ ID NO: 67211 - RNA, 19 nt, synthetic construct
  misc_feature 1..19: note = siRNA antisense sequence
  source 1..19: mol_type = other RNA
ggatgaagaataaagcttt

SEQ ID NO: 67212 - RNA, 19 nt, synthetic construct
  misc_feature 1..19: note = siRNA sense sequence
  source 1..19: mol_type = other RNA
aagctttattcttcatcca

SEQ ID NO: 67213 - RNA, 19 nt, synthetic construct
  misc_feature 1..19: note = siRNA antisense sequence
  source 1..19: mol_type = other RNA
tggatgaagaataaagctt

SEQ ID NO: 67214 - RNA, 19 nt, synthetic construct
  misc_feature 1..19: note = siRNA sense sequence
  source 1..19: mol_type = other RNA
gctttattcttcatccaat

SEQ ID NO: 67215 - RNA, 19 nt, synthetic construct
  misc_feature 1..19: note = siRNA antisense sequence
  source 1..19: mol_type = other RNA
attggatgaagaataaagc

SEQ ID NO: 67216 - RNA, 19 nt, synthetic construct
  misc_feature 1..19: note = siRNA sense sequence
  source 1..19: mol_type = other RNA
cttcatccaatatacatgt

SEQ ID NO: 67217 - RNA, 19 nt, synthetic construct
  misc_feature 1..19: note = siRNA antisense sequence
  source 1..19: mol_type = other RNA
acatgtatattggatgaag

SEQ ID NO: 67218 - RNA, 19 nt, synthetic construct
  misc_feature 1..19: note = siRNA sense sequence
  source 1..19: mol_type = other RNA
tcatccaatatacatgttc

SEQ ID NO: 67219 - RNA, 19 nt, synthetic construct
  misc_feature 1..19: note = siRNA antisense sequence
  source 1..19: mol_type = other RNA
gaacatgtatattggatga

SEQ ID NO: 67220 - RNA, 19 nt, synthetic construct
  misc_feature 1..19: note = siRNA sense sequence
  source 1..19: mol_type = other RNA
catccaatatacatgttct

SEQ ID NO: 67221 - RNA, 19 nt, synthetic construct
  misc_feature 1..19: note = siRNA antisense sequence
  source 1..19: mol_type = other RNA
agaacatgtatattggatg

SEQ ID NO: 67222 - RNA, 19 nt, synthetic construct
  misc_feature 1..19: note = siRNA sense sequence
  source 1..19: mol_type = other RNA
tccaatatacatgttctgg

SEQ ID NO: 67223 - RNA, 19 nt, synthetic construct
  misc_feature 1..19: note = siRNA antisense sequence
  source 1..19: mol_type = other RNA
ccagaacatgtatattgga

SEQ ID NO: 67224 - RNA, 19 nt, synthetic construct
  misc_feature 1..19: note = siRNA sense sequence
  source 1..19: mol_type = other RNA
ttcattcagcaattattcc

SEQ ID NO: 67225 - RNA, 19 nt, synthetic construct
  misc_feature 1..19: note = siRNA antisense sequence
  source 1..19: mol_type = other RNA
ggaataattgctgaatgaa

SEQ ID NO: 67226 - RNA, 19 nt, synthetic construct
  misc_feature 1..19: note = siRNA sense sequence
  source 1..19: mol_type = other RNA
tcattcagcaattattcca

SEQ ID NO: 67227 - RNA, 19 nt, synthetic construct
  misc_feature 1..19: note = siRNA antisense sequence
  source 1..19: mol_type = other RNA
tggaataattgctgaatga

SEQ ID NO: 67228 - RNA, 19 nt, synthetic construct
  misc_feature 1..19: note = siRNA sense sequence
  source 1..19: mol_type = other RNA
cattcagcaattattccat

SEQ ID NO: 67229 - RNA, 19 nt, synthetic construct
  misc_feature 1..19: note = siRNA antisense sequence
  source 1..19: mol_type = other RNA
atggaataattgctgaatg

SEQ ID NO: 67230 - RNA, 19 nt, synthetic construct
  misc_feature 1..19: note = siRNA sense sequence
  source 1..19: mol_type = other RNA
cagcaattattccatgtta

SEQ ID NO: 67231 - RNA, 19 nt, synthetic construct
  misc_feature 1..19: note = siRNA antisense sequence
  source 1..19: mol_type = other RNA
taacatggaataattgctg

SEQ ID NO: 67232 - RNA, 19 nt, synthetic construct
  misc_feature 1..19: note = siRNA sense sequence
  source 1..19: mol_type = other RNA
taagcacttacttttctga

SEQ ID NO: 67233 - RNA, 19 nt, synthetic construct
  misc_feature 1..19: note = siRNA antisense sequence
  source 1..19: mol_type = other RNA
tcagaaaagtaagtgctta

SEQ ID NO: 67234 - RNA, 19 nt, synthetic construct
  misc_feature 1..19: note = siRNA sense sequence
  source 1..19: mol_type = other RNA
aagcacttacttttctgac

SEQ ID NO: 67235 - RNA, 19 nt, synthetic construct
  misc_feature 1..19: note = siRNA antisense sequence
  source 1..19: mol_type = other RNA
gtcagaaaagtaagtgctt

SEQ ID NO: 67236 - RNA, 19 nt, synthetic construct
  misc_feature 1..19: note = siRNA sense sequence
  source 1..19: mol_type = other RNA
gcacttacttttctgacag

SEQ ID NO: 67237 - RNA, 19 nt, synthetic construct
  misc_feature 1..19: note = siRNA antisense sequence
  source 1..19: mol_type = other RNA
ctgtcagaaaagtaagtgc

SEQ ID NO: 67238 - RNA, 19 nt, synthetic construct
  misc_feature 1..19: note = siRNA sense sequence
  source 1..19: mol_type = other RNA
cacttacttttctgacagt

SEQ ID NO: 67239 - RNA, 19 nt, synthetic construct
  misc_feature 1..19: note = siRNA antisense sequence
  source 1..19: mol_type = other RNA
actgtcagaaaagtaagtg

SEQ ID NO: 67240 - RNA, 19 nt, synthetic construct
  misc_feature 1..19: note = siRNA sense sequence
  source 1..19: mol_type = other RNA
acttacttttctgacagtt

SEQ ID NO: 67241 - RNA, 19 nt, synthetic construct
  misc_feature 1..19: note = siRNA antisense sequence
  source 1..19: mol_type = other RNA
aactgtcagaaaagtaagt

SEQ ID NO: 67242 - RNA, 19 nt, synthetic construct
  misc_feature 1..19: note = siRNA sense sequence
  source 1..19: mol_type = other RNA
cttacttttctgacagtta

SEQ ID NO: 67243 - RNA, 19 nt, synthetic construct
  misc_feature 1..19: note = siRNA antisense sequence
  source 1..19: mol_type = other RNA
taactgtcagaaaagtaag

SEQ ID NO: 67244 - RNA, 19 nt, synthetic construct
  misc_feature 1..19: note = siRNA sense sequence
  source 1..19: mol_type = other RNA
tacttttctgacagttatc

SEQ ID NO: 67245 - RNA, 19 nt, synthetic construct
  misc_feature 1..19: note = siRNA antisense sequence
  source 1..19: mol_type = other RNA
gataactgtcagaaaagta

SEQ ID NO: 67246 - RNA, 19 nt, synthetic construct
  misc_feature 1..19: note = siRNA sense sequence
  source 1..19: mol_type = other RNA
ttctgacagttatcacctc

SEQ ID NO: 67247 - RNA, 19 nt, synthetic construct
  misc_feature 1..19: note = siRNA antisense sequence
  source 1..19: mol_type = other RNA
gaggtgataactgtcagaa

SEQ ID NO: 67248 - RNA, 19 nt, synthetic construct
  misc_feature 1..19: note = siRNA sense sequence
  source 1..19: mol_type = other RNA
tctgacagttatcacctca

SEQ ID NO: 67249 - RNA, 19 nt, synthetic construct
  misc_feature 1..19: note = siRNA antisense sequence
  source 1..19: mol_type = other RNA
tgaggtgataactgtcaga

SEQ ID NO: 67250 - RNA, 19 nt, synthetic construct
  misc_feature 1..19: note = siRNA sense sequence
  source 1..19: mol_type = other RNA
ctgacagttatcacctcat

SEQ ID NO: 67251 - RNA, 19 nt, synthetic construct
  misc_feature 1..19: note = siRNA antisense sequence
  source 1..19: mol_type = other RNA
atgaggtgataactgtcag

SEQ ID NO: 67252 - RNA, 19 nt, synthetic construct
  misc_feature 1..19: note = siRNA sense sequence
  source 1..19: mol_type = other RNA
tgacagttatcacctcatt

SEQ ID NO: 67253 - RNA, 19 nt, synthetic construct
  misc_feature 1..19: note = siRNA antisense sequence
  source 1..19: mol_type = other RNA
aatgaggtgataactgtca

SEQ ID NO: 67254 - RNA, 19 nt, synthetic construct
  misc_feature 1..19: note = siRNA sense sequence
  source 1..19: mol_type = other RNA
gacagttatcacctcatta

SEQ ID NO: 67255 - RNA, 19 nt, synthetic construct
  misc_feature 1..19: note = siRNA antisense sequence
  source 1..19: mol_type = other RNA
taatgaggtgataactgtc

SEQ ID NO: 67256 - RNA, 19 nt, synthetic construct
  misc_feature 1..19: note = siRNA sense sequence
  source 1..19: mol_type = other RNA
acagttatcacctcattag

SEQ ID NO: 67257 - RNA, 19 nt, synthetic construct
  misc_feature 1..19: note = siRNA antisense sequence
  source 1..19: mol_type = other RNA
ctaatgaggtgataactgt

SEQ ID NO: 67258 - RNA, 19 nt, synthetic construct
  misc_feature 1..19: note = siRNA sense sequence
  source 1..19: mol_type = other RNA
cagttatcacctcattaga

SEQ ID NO: 67259 - RNA, 19 nt, synthetic construct
  misc_feature 1..19: note = siRNA antisense sequence
  source 1..19: mol_type = other RNA
tctaatgaggtgataactg

SEQ ID NO: 67260 - RNA, 19 nt, synthetic construct
  misc_feature 1..19: note = siRNA sense sequence
  source 1..19: mol_type = other RNA
agttatcacctcattagag

SEQ ID NO: 67261 - RNA, 19 nt, synthetic construct
  misc_feature 1..19: note = siRNA antisense sequence
  source 1..19: mol_type = other RNA
ctctaatgaggtgataact

SEQ ID NO: 67262 - RNA, 19 nt, synthetic construct
  misc_feature 1..19: note = siRNA sense sequence
  source 1..19: mol_type = other RNA
gttatcacctcattagagc

SEQ ID NO: 67263 - RNA, 19 nt, synthetic construct
  misc_feature 1..19: note = siRNA antisense sequence
  source 1..19: mol_type = other RNA
gctctaatgaggtgataac

SEQ ID NO: 67264 - RNA, 19 nt, synthetic construct
  misc_feature 1..19: note = siRNA sense sequence
  source 1..19: mol_type = other RNA
tcacctcattagagccttt

SEQ ID NO: 67265 - RNA, 19 nt, synthetic construct
  misc_feature 1..19: note = siRNA antisense sequence
  source 1..19: mol_type = other RNA
aaaggctctaatgaggtga

SEQ ID NO: 67266 - RNA, 19 nt, synthetic construct
  misc_feature 1..19: note = siRNA sense sequence
  source 1..19: mol_type = other RNA
cacctcattagagcctttg

SEQ ID NO: 67267 - RNA, 19 nt, synthetic construct
  misc_feature 1..19: note = siRNA antisense sequence
  source 1..19: mol_type = other RNA
caaaggctctaatgaggtg

SEQ ID NO: 67268 - RNA, 19 nt, synthetic construct
  misc_feature 1..19: note = siRNA sense sequence
  source 1..19: mol_type = other RNA
acctcattagagcctttgc

SEQ ID NO: 67269 - RNA, 19 nt, synthetic construct
  misc_feature 1..19: note = siRNA antisense sequence
  source 1..19: mol_type = other RNA
gcaaaggctctaatgaggt

SEQ ID NO: 67270 - RNA, 19 nt, synthetic construct
  misc_feature 1..19: note = siRNA sense sequence
  source 1..19: mol_type = other RNA
cctcattagagcctttgcc

SEQ ID NO: 67271 - RNA, 19 nt, synthetic construct
  misc_feature 1..19: note = siRNA antisense sequence
  source 1..19: mol_type = other RNA
ggcaaaggctctaatgagg

SEQ ID NO: 67272 - RNA, 19 nt, synthetic construct
  misc_feature 1..19: note = siRNA sense sequence
  source 1..19: mol_type = other RNA
ttagagcctttgccatagg

SEQ ID NO: 67273 - RNA, 19 nt, synthetic construct
  misc_feature 1..19: note = siRNA antisense sequence
  source 1..19: mol_type = other RNA
cctatggcaaaggctctaa

SEQ ID NO: 67274 - RNA, 19 nt, synthetic construct
  misc_feature 1..19: note = siRNA sense sequence
  source 1..19: mol_type = other RNA
tagagcctttgccataggg

SEQ ID NO: 67275 - RNA, 19 nt, synthetic construct
  misc_feature 1..19: note = siRNA antisense sequence
  source 1..19: mol_type = other RNA
ccctatggcaaaggctcta

SEQ ID NO: 67276 - RNA, 19 nt, synthetic construct
  misc_feature 1..19: note = siRNA sense sequence
  source 1..19: mol_type = other RNA
gagcctttgccatagggtt

SEQ ID NO: 67277 - RNA, 19 nt, synthetic construct
  misc_feature 1..19: note = siRNA antisense sequence
  source 1..19: mol_type = other RNA
aaccctatggcaaaggctc

SEQ ID NO: 67278 - RNA, 19 nt, synthetic construct
  misc_feature 1..19: note = siRNA sense sequence
  source 1..19: mol_type = other RNA
agcctttgccatagggttt

SEQ ID NO: 67279 - RNA, 19 nt, synthetic construct
  misc_feature 1..19: note = siRNA antisense sequence
  source 1..19: mol_type = other RNA
aaaccctatggcaaaggct

SEQ ID NO: 67280 - RNA, 19 nt, synthetic construct
  misc_feature 1..19: note = siRNA sense sequence
  source 1..19: mol_type = other RNA
gcctttgccatagggtttt

SEQ ID NO: 67281 - RNA, 19 nt, synthetic construct
  misc_feature 1..19: note = siRNA antisense sequence
  source 1..19: mol_type = other RNA
aaaaccctatggcaaaggc

SEQ ID NO: 67282 - RNA, 19 nt, synthetic construct
  misc_feature 1..19: note = siRNA sense sequence
  source 1..19: mol_type = other RNA
cctttgccatagggttttg

SEQ ID NO: 67283 - RNA, 19 nt, synthetic construct
  misc_feature 1..19: note = siRNA antisense sequence
  source 1..19: mol_type = other RNA
caaaaccctatggcaaagg

SEQ ID NO: 67284 - RNA, 19 nt, synthetic construct
  misc_feature 1..19: note = siRNA sense sequence
  source 1..19: mol_type = other RNA
caagggatcatgaagcaaa

SEQ ID NO: 67285 - RNA, 19 nt, synthetic construct
  misc_feature 1..19: note = siRNA antisense sequence
  source 1..19: mol_type = other RNA
tttgcttcatgatcccttg

SEQ ID NO: 67286 - RNA, 19 nt, synthetic construct
  misc_feature 1..19: note = siRNA sense sequence
  source 1..19: mol_type = other RNA
aaagccagtgctgcaaaga

SEQ ID NO: 67287 - RNA, 19 nt, synthetic construct
  misc_feature 1..19: note = siRNA antisense sequence
  source 1..19: mol_type = other RNA
tctttgcagcactggcttt

SEQ ID NO: 67288 - RNA, 19 nt, synthetic construct
  misc_feature 1..19: note = siRNA sense sequence
  source 1..19: mol_type = other RNA
aagccagtgctgcaaagaa

SEQ ID NO: 67289 - RNA, 19 nt, synthetic construct
  misc_feature 1..19: note = siRNA antisense sequence
  source 1..19: mol_type = other RNA
ttctttgcagcactggctt

SEQ ID NO: 67290 - RNA, 19 nt, synthetic construct
  misc_feature 1..19: note = siRNA sense sequence
  source 1..19: mol_type = other RNA
ctattggtttcaaatttgg

SEQ ID NO: 67291 - RNA, 19 nt, synthetic construct
  misc_feature 1..19: note = siRNA antisense sequence
  source 1..19: mol_type = other RNA
ccaaatttgaaaccaatag

SEQ ID NO: 67292 - RNA, 19 nt, synthetic construct
  misc_feature 1..19: note = siRNA sense sequence
  source 1..19: mol_type = other RNA
tattggtttcaaatttggg

SEQ ID NO: 67293 - RNA, 19 nt, synthetic construct
  misc_feature 1..19: note = siRNA antisense sequence
  source 1..19: mol_type = other RNA
cccaaatttgaaaccaata

SEQ ID NO: 67294 - RNA, 19 nt, synthetic construct
  misc_feature 1..19: note = siRNA sense sequence
  source 1..19: mol_type = other RNA
ttggtttcaaatttgggct

SEQ ID NO: 67295 - RNA, 19 nt, synthetic construct
  misc_feature 1..19: note = siRNA antisense sequence
  source 1..19: mol_type = other RNA
agcccaaatttgaaaccaa

SEQ ID NO: 67296 - RNA, 19 nt, synthetic construct
  misc_feature 1..19: note = siRNA sense sequence
  source 1..19: mol_type = other RNA
tggtttcaaatttgggcta

SEQ ID NO: 67297 - RNA, 19 nt, synthetic construct
  misc_feature 1..19: note = siRNA antisense sequence
  source 1..19: mol_type = other RNA
tagcccaaatttgaaacca

SEQ ID NO: 67298 - RNA, 19 nt, synthetic construct
  misc_feature 1..19: note = siRNA sense sequence
  source 1..19: mol_type = other RNA
ggtttcaaatttgggctag

SEQ ID NO: 67299 - RNA, 19 nt, synthetic construct
  misc_feature 1..19: note = siRNA antisense sequence
  source 1..19: mol_type = other RNA
ctagcccaaatttgaaacc

SEQ ID NO: 67300 - RNA, 19 nt, synthetic construct
  misc_feature 1..19: note = siRNA sense sequence
  source 1..19: mol_type = other RNA
gtttcaaatttgggctagg

SEQ ID NO: 67301 - RNA, 19 nt, synthetic construct
  misc_feature 1..19: note = siRNA antisense sequence
  source 1..19: mol_type = other RNA
cctagcccaaatttgaaac

SEQ ID NO: 67302 - RNA, 19 nt, synthetic construct
  misc_feature 1..19: note = siRNA sense sequence
  source 1..19: mol_type = other RNA
tttcaaatttgggctagga

SEQ ID NO: 67303 - RNA, 19 nt, synthetic construct
  misc_feature 1..19: note = siRNA antisense sequence
  source 1..19: mol_type = other RNA
tcctagcccaaatttgaaa

SEQ ID NO: 67304 - RNA, 19 nt, synthetic construct
  misc_feature 1..19: note = siRNA sense sequence
  source 1..19: mol_type = other RNA
ttcaaatttgggctaggat

SEQ ID NO: 67305 - RNA, 19 nt, synthetic construct
  misc_feature 1..19: note = siRNA antisense sequence
  source 1..19: mol_type = other RNA
atcctagcccaaatttgaa

SEQ ID NO: 67306 - RNA, 19 nt, synthetic construct
  misc_feature 1..19: note = siRNA sense sequence
  source 1..19: mol_type = other RNA
tcaaatttgggctaggatt

SEQ ID NO: 67307 - RNA, 19 nt, synthetic construct
  misc_feature 1..19: note = siRNA antisense sequence
  source 1..19: mol_type = other RNA
aatcctagcccaaatttga

SEQ ID NO: 67308 - RNA, 19 nt, synthetic construct
  misc_feature 1..19: note = siRNA sense sequence
  source 1..19: mol_type = other RNA
caaatttgggctaggattg

SEQ ID NO: 67309 - RNA, 19 nt, synthetic construct
  misc_feature 1..19: note = siRNA antisense sequence
  source 1..19: mol_type = other RNA
caatcctagcccaaatttg

SEQ ID NO: 67310 - RNA, 19 nt, synthetic construct
  misc_feature 1..19: note = siRNA sense sequence
  source 1..19: mol_type = other RNA
aaatttgggctaggattgg

SEQ ID NO: 67311 - RNA, 19 nt, synthetic construct
  misc_feature 1..19: note = siRNA antisense sequence
  source 1..19: mol_type = other RNA
ccaatcctagcccaaattt

SEQ ID NO: 67312 - RNA, 19 nt, synthetic construct
  misc_feature 1..19: note = siRNA sense sequence
  source 1..19: mol_type = other RNA
aatttgggctaggattggc

SEQ ID NO: 67313 - RNA, 19 nt, synthetic construct
  misc_feature 1..19: note = siRNA antisense sequence
  source 1..19: mol_type = other RNA
gccaatcctagcccaaatt

SEQ ID NO: 67314 - RNA, 19 nt, synthetic construct
  misc_feature 1..19: note = siRNA sense sequence
  source 1..19: mol_type = other RNA
atttgggctaggattggcc

SEQ ID NO: 67315 - RNA, 19 nt, synthetic construct
  misc_feature 1..19: note = siRNA antisense sequence
  source 1..19: mol_type = other RNA
ggccaatcctagcccaaat

SEQ ID NO: 67316 - RNA, 19 nt, synthetic construct
  misc_feature 1..19: note = siRNA sense sequence
  source 1..19: mol_type = other RNA
ggctaggattggcccagtc

SEQ ID NO: 67317 - RNA, 19 nt, synthetic construct
  misc_feature 1..19: note = siRNA antisense sequence
  source 1..19: mol_type = other RNA
gactgggccaatcctagcc

SEQ ID NO: 67318 - RNA, 19 nt, synthetic construct
  misc_feature 1..19: note = siRNA sense sequence
  source 1..19: mol_type = other RNA
gctaggattggcccagtcc

SEQ ID NO: 67319 - RNA, 19 nt, synthetic construct
  misc_feature 1..19: note = siRNA antisense sequence
  source 1..19: mol_type = other RNA
ggactgggccaatcctagc

SEQ ID NO: 67320 - RNA, 19 nt, synthetic construct
  misc_feature 1..19: note = siRNA sense sequence
  source 1..19: mol_type = other RNA
ctaggattggcccagtcca

SEQ ID NO: 67321 - RNA, 19 nt, synthetic construct
  misc_feature 1..19: note = siRNA antisense sequence
  source 1..19: mol_type = other RNA
tggactgggccaatcctag

SEQ ID NO: 67322 - RNA, 19 nt, synthetic construct
  misc_feature 1..19: note = siRNA sense sequence
  source 1..19: mol_type = other RNA
taggattggcccagtccat

SEQ ID NO: 67323 - RNA, 19 nt, synthetic construct
  misc_feature 1..19: note = siRNA antisense sequence
  source 1..19: mol_type = other RNA
atggactgggccaatccta

SEQ ID NO: 67324 - RNA, 19 nt, synthetic construct
  misc_feature 1..19: note = siRNA sense sequence
  source 1..19: mol_type = other RNA
aggattggcccagtccatc

SEQ ID NO: 67325 - RNA, 19 nt, synthetic construct
  misc_feature 1..19: note = siRNA antisense sequence
  source 1..19: mol_type = other RNA
gatggactgggccaatcct

SEQ ID NO: 67326 - RNA, 19 nt, synthetic construct
  misc_feature 1..19: note = siRNA sense sequence
  source 1..19: mol_type = other RNA
ggattggcccagtccatct

SEQ ID NO: 67327 - RNA, 19 nt, synthetic construct
  misc_feature 1..19: note = siRNA antisense sequence
  source 1..19: mol_type = other RNA
agatggactgggccaatcc

SEQ ID NO: 67328 - RNA, 19 nt, synthetic construct
  misc_feature 1..19: note = siRNA sense sequence
  source 1..19: mol_type = other RNA
gattggcccagtccatctt

SEQ ID NO: 67329 - RNA, 19 nt, synthetic construct
  misc_feature 1..19: note = siRNA antisense sequence
  source 1..19: mol_type = other RNA
aagatggactgggccaatc

SEQ ID NO: 67330 - RNA, 19 nt, synthetic construct
  misc_feature 1..19: note = siRNA sense sequence
  source 1..19: mol_type = other RNA
attggcccagtccatcttg

SEQ ID NO: 67331 - RNA, 19 nt, synthetic construct
  misc_feature 1..19: note = siRNA antisense sequence
  source 1..19: mol_type = other RNA
caagatggactgggccaat

SEQ ID NO: 67332 - RNA, 19 nt, synthetic construct
  misc_feature 1..19: note = siRNA sense sequence
  source 1..19: mol_type = other RNA
ttggcccagtccatcttga

SEQ ID NO: 67333 - RNA, 19 nt, synthetic construct
  misc_feature 1..19: note = siRNA antisense sequence
  source 1..19: mol_type = other RNA
tcaagatggactgggccaa

SEQ ID NO: 67334 - RNA, 19 nt, synthetic construct
  misc_feature 1..19: note = siRNA sense sequence
  source 1..19: mol_type = other RNA
tggcccagtccatcttgaa

SEQ ID NO: 67335 - RNA, 19 nt, synthetic construct
  misc_feature 1..19: note = siRNA antisense sequence
  source 1..19: mol_type = other RNA
ttcaagatggactgggcca

SEQ ID NO: 67336 - RNA, 19 nt, synthetic construct
  misc_feature 1..19: note = siRNA sense sequence
  source 1..19: mol_type = other RNA
ggcccagtccatcttgaag

SEQ ID NO: 67337 - RNA, 19 nt, synthetic construct
  misc_feature 1..19: note = siRNA antisense sequence
  source 1..19: mol_type = other RNA
cttcaagatggactgggcc

SEQ ID NO: 67338 - RNA, 19 nt, synthetic construct
  misc_feature 1..19: note = siRNA sense sequence
  source 1..19: mol_type = other RNA
gcccagtccatcttgaagc

SEQ ID NO: 67339 - RNA, 19 nt, synthetic construct
  misc_feature 1..19: note = siRNA antisense sequence
  source 1..19: mol_type = other RNA
gcttcaagatggactgggc

SEQ ID NO: 67340 - RNA, 19 nt, synthetic construct
  misc_feature 1..19: note = siRNA sense sequence
  source 1..19: mol_type = other RNA
cccagtccatcttgaagct

SEQ ID NO: 67341 - RNA, 19 nt, synthetic construct
  misc_feature 1..19: note = siRNA antisense sequence
  source 1..19: mol_type = other RNA
agcttcaagatggactggg

SEQ ID NO: 67342 - RNA, 19 nt, synthetic construct
  misc_feature 1..19: note = siRNA sense sequence
  source 1..19: mol_type = other RNA
ccagtccatcttgaagcta

SEQ ID NO: 67343 - RNA, 19 nt, synthetic construct
  misc_feature 1..19: note = siRNA antisense sequence
  source 1..19: mol_type = other RNA
tagcttcaagatggactgg

SEQ ID NO: 67344 - RNA, 19 nt, synthetic construct
  misc_feature 1..19: note = siRNA sense sequence
  source 1..19: mol_type = other RNA
cagtccatcttgaagctat

SEQ ID NO: 67345 - RNA, 19 nt, synthetic construct
  misc_feature 1..19: note = siRNA antisense sequence
  source 1..19: mol_type = other RNA
atagcttcaagatggactg

SEQ ID NO: 67346 - RNA, 19 nt, synthetic construct
  misc_feature 1..19: note = siRNA sense sequence
  source 1..19: mol_type = other RNA
agtccatcttgaagctata

SEQ ID NO: 67347 - RNA, 19 nt, synthetic construct
  misc_feature 1..19: note = siRNA antisense sequence
  source 1..19: mol_type = other RNA
tatagcttcaagatggact

SEQ ID NO: 67348 - RNA, 19 nt, synthetic construct
  misc_feature 1..19: note = siRNA sense sequence
  source 1..19: mol_type = other RNA
gtccatcttgaagctataa

SEQ ID NO: 67349 - RNA, 19 nt, synthetic construct
  misc_feature 1..19: note = siRNA antisense sequence
  source 1..19: mol_type = other RNA
ttatagcttcaagatggac

SEQ ID NO: 67350 - RNA, 19 nt, synthetic construct
  misc_feature 1..19: note = siRNA sense sequence
  source 1..19: mol_type = other RNA
tccatcttgaagctataaa

SEQ ID NO: 67351 - RNA, 19 nt, synthetic construct
  misc_feature 1..19: note = siRNA antisense sequence
  source 1..19: mol_type = other RNA
tttatagcttcaagatgga

SEQ ID NO: 67352 - RNA, 19 nt, synthetic construct
  misc_feature 1..19: note = siRNA sense sequence
  source 1..19: mol_type = other RNA
actattttctcctaatctc

SEQ ID NO: 67353 - RNA, 19 nt, synthetic construct
  misc_feature 1..19: note = siRNA antisense sequence
  source 1..19: mol_type = other RNA
gagattaggagaaaatagt

SEQ ID NO: 67354 - RNA, 19 nt, synthetic construct
  misc_feature 1..19: note = siRNA sense sequence
  source 1..19: mol_type = other RNA
attttctcctaatctccac

SEQ ID NO: 67355 - RNA, 19 nt, synthetic construct
  misc_feature 1..19: note = siRNA antisense sequence
  source 1..19: mol_type = other RNA
gtggagattaggagaaaat

SEQ ID NO: 67356 - RNA, 19 nt, synthetic construct
  misc_feature 1..19: note = siRNA sense sequence
  source 1..19: mol_type = other RNA
tttctcctaatctccactc

SEQ ID NO: 67357 - RNA, 19 nt, synthetic construct
  misc_feature 1..19: note = siRNA antisense sequence
  source 1..19: mol_type = other RNA
gagtggagattaggagaaa

SEQ ID NO: 67358 - RNA, 19 nt, synthetic construct
  misc_feature 1..19: note = siRNA sense sequence
  source 1..19: mol_type = other RNA
ttctcctaatctccactct

SEQ ID NO: 67359 - RNA, 19 nt, synthetic construct
  misc_feature 1..19: note = siRNA antisense sequence
  source 1..19: mol_type = other RNA
agagtggagattaggagaa

SEQ ID NO: 67360 - RNA, 19 nt, synthetic construct
  misc_feature 1..19: note = siRNA sense sequence
  source 1..19: mol_type = other RNA
tctcctaatctccactctt

SEQ ID NO: 67361 - RNA, 19 nt, synthetic construct
  misc_feature 1..19: note = siRNA antisense sequence
  source 1..19: mol_type = other RNA
aagagtggagattaggaga

SEQ ID NO: 67362 - RNA, 19 nt, synthetic construct
  misc_feature 1..19: note = siRNA sense sequence
  source 1..19: mol_type = other RNA
tcctaatctccactctttg

SEQ ID NO: 67363 - RNA, 19 nt, synthetic construct
  misc_feature 1..19: note = siRNA antisense sequence
  source 1..19: mol_type = other RNA
caaagagtggagattagga

SEQ ID NO: 67364 - RNA, 19 nt, synthetic construct
  misc_feature 1..19: note = siRNA sense sequence
  source 1..19: mol_type = other RNA
cctaatctccactctttgc

SEQ ID NO: 67365 - RNA, 19 nt, synthetic construct
  misc_feature 1..19: note = siRNA antisense sequence
  source 1..19: mol_type = other RNA
gcaaagagtggagattagg

SEQ ID NO: 67366 - RNA, 19 nt, synthetic construct
  misc_feature 1..19: note = siRNA sense sequence
  source 1..19: mol_type = other RNA
ctaatctccactctttgcc

SEQ ID NO: 67367 - RNA, 19 nt, synthetic construct
  misc_feature 1..19: note = siRNA antisense sequence
  source 1..19: mol_type = other RNA
ggcaaagagtggagattag

SEQ ID NO: 67368 - RNA, 19 nt, synthetic construct
  misc_feature 1..19: note = siRNA sense sequence
  source 1..19: mol_type = other RNA
aatctccactctttgccac

SEQ ID NO: 67369 - RNA, 19 nt, synthetic construct
  misc_feature 1..19: note = siRNA antisense sequence
  source 1..19: mol_type = other RNA
gtggcaaagagtggagatt

SEQ ID NO: 67370 - RNA, 19 nt, synthetic construct
  misc_feature 1..19: note = siRNA sense sequence
  source 1..19: mol_type = other RNA
atctccactctttgccact

SEQ ID NO: 67371 - RNA, 19 nt, synthetic construct
  misc_feature 1..19: note = siRNA antisense sequence
  source 1..19: mol_type = other RNA
agtggcaaagagtggagat

SEQ ID NO: 67372 - RNA, 19 nt, synthetic construct
  misc_feature 1..19: note = siRNA sense sequence
  source 1..19: mol_type = other RNA
tctccactctttgccactc

SEQ ID NO: 67373 - RNA, 19 nt, synthetic construct
  misc_feature 1..19: note = siRNA antisense sequence
  source 1..19: mol_type = other RNA
gagtggcaaagagtggaga

SEQ ID NO: 67374 - RNA, 19 nt, synthetic construct
  misc_feature 1..19: note = siRNA sense sequence
  source 1..19: mol_type = other RNA
cactctttgccactcaact

SEQ ID NO: 67375 - RNA, 19 nt, synthetic construct
  misc_feature 1..19: note = siRNA antisense sequence
  source 1..19: mol_type = other RNA
agttgagtggcaaagagtg

SEQ ID NO: 67376 - RNA, 19 nt, synthetic construct
  misc_feature 1..19: note = siRNA sense sequence
  source 1..19: mol_type = other RNA
ctttgccactcaacttctc

SEQ ID NO: 67377 - RNA, 19 nt, synthetic construct
  misc_feature 1..19: note = siRNA antisense sequence
  source 1..19: mol_type = other RNA
gagaagttgagtggcaaag

SEQ ID NO: 67378 - RNA, 19 nt, synthetic construct
  misc_feature 1..19: note = siRNA sense sequence
  source 1..19: mol_type = other RNA
tttgccactcaacttctct

SEQ ID NO: 67379 - RNA, 19 nt, synthetic construct
  misc_feature 1..19: note = siRNA antisense sequence
  source 1..19: mol_type = other RNA
agagaagttgagtggcaaa

SEQ ID NO: 67380 - RNA, 19 nt, synthetic construct
  misc_feature 1..19: note = siRNA sense sequence
  source 1..19: mol_type = other RNA
ttgccactcaacttctctt

SEQ ID NO: 67381 - RNA, 19 nt, synthetic construct
  misc_feature 1..19: note = siRNA antisense sequence
  source 1..19: mol_type = other RNA
aagagaagttgagtggcaa

SEQ ID NO: 67382 - RNA, 19 nt, synthetic construct
  misc_feature 1..19: note = siRNA sense sequence
  source 1..19: mol_type = other RNA
ccactcaacttctcttaaa

SEQ ID NO: 67383 - RNA, 19 nt, synthetic construct
  misc_feature 1..19: note = siRNA antisense sequence
  source 1..19: mol_type = other RNA
tttaagagaagttgagtgg

SEQ ID NO: 67384 - RNA, 19 nt, synthetic construct
  misc_feature 1..19: note = siRNA sense sequence
  source 1..19: mol_type = other RNA
cactcaacttctcttaaaa

SEQ ID NO: 67385 - RNA, 19 nt, synthetic construct
  misc_feature 1..19: note = siRNA antisense sequence
  source 1..19: mol_type = other RNA
ttttaagagaagttgagtg

SEQ ID NO: 67386 - RNA, 19 nt, synthetic construct
  misc_feature 1..19: note = siRNA sense sequence
  source 1..19: mol_type = other RNA
ttggttgggtggagtgctt

SEQ ID NO: 67387 - RNA, 19 nt, synthetic construct
  misc_feature 1..19: note = siRNA antisense sequence
  source 1..19: mol_type = other RNA
aagcactccacccaaccaa

SEQ ID NO: 67388 - RNA, 19 nt, synthetic construct
  misc_feature 1..19: note = siRNA sense sequence
  source 1..19: mol_type = other RNA
tggttgggtggagtgctta

SEQ ID NO: 67389 - RNA, 19 nt, synthetic construct
  misc_feature 1..19: note = siRNA antisense sequence
  source 1..19: mol_type = other RNA
taagcactccacccaacca

SEQ ID NO: 67390 - RNA, 19 nt, synthetic construct
  misc_feature 1..19: note = siRNA sense sequence
  source 1..19: mol_type = other RNA
ggttgggtggagtgcttag

SEQ ID NO: 67391 - RNA, 19 nt, synthetic construct
  misc_feature 1..19: note = siRNA antisense sequence
  source 1..19: mol_type = other RNA
ctaagcactccacccaacc

SEQ ID NO: 67392 - RNA, 19 nt, synthetic construct
  misc_feature 1..19: note = siRNA sense sequence
  source 1..19: mol_type = other RNA
gttgggtggagtgcttaga

SEQ ID NO: 67393 - RNA, 19 nt, synthetic construct
  misc_feature 1..19: note = siRNA antisense sequence
  source 1..19: mol_type = other RNA
tctaagcactccacccaac

SEQ ID NO: 67394 - RNA, 19 nt, synthetic construct
  misc_feature 1..19: note = siRNA sense sequence
  source 1..19: mol_type = other RNA
ttgggtggagtgcttagat

SEQ ID NO: 67395 - RNA, 19 nt, synthetic construct
  misc_feature 1..19: note = siRNA antisense sequence
  source 1..19: mol_type = other RNA
atctaagcactccacccaa

SEQ ID NO: 67396 - RNA, 19 nt, synthetic construct
  misc_feature 1..19: note = siRNA sense sequence
  source 1..19: mol_type = other RNA
tgggtggagtgcttagata

SEQ ID NO: 67397 - RNA, 19 nt, synthetic construct
  misc_feature 1..19: note = siRNA antisense sequence
  source 1..19: mol_type = other RNA
tatctaagcactccaccca

SEQ ID NO: 67398 - RNA, 19 nt, synthetic construct
  misc_feature 1..19: note = siRNA sense sequence
  source 1..19: mol_type = other RNA
gggtggagtgcttagataa

SEQ ID NO: 67399 - RNA, 19 nt, synthetic construct
  misc_feature 1..19: note = siRNA antisense sequence
  source 1..19: mol_type = other RNA
ttatctaagcactccaccc

SEQ ID NO: 67400 - RNA, 19 nt, synthetic construct
  misc_feature 1..19: note = siRNA sense sequence
  source 1..19: mol_type = other RNA
ggtggagtgcttagataac

SEQ ID NO: 67401 - RNA, 19 nt, synthetic construct
  misc_feature 1..19: note = siRNA antisense sequence
  source 1..19: mol_type = other RNA
gttatctaagcactccacc

SEQ ID NO: 67402 - RNA, 19 nt, synthetic construct
  misc_feature 1..19: note = siRNA sense sequence
  source 1..19: mol_type = other RNA
ttaatgtgtagaagccaag

SEQ ID NO: 67403 - RNA, 19 nt, synthetic construct
  misc_feature 1..19: note = siRNA antisense sequence
  source 1..19: mol_type = other RNA
cttggcttctacacattaa

SEQ ID NO: 67404 - RNA, 19 nt, synthetic construct
  misc_feature 1..19: note = siRNA sense sequence
  source 1..19: mol_type = other RNA
tgtgtagaagccaaggagc

SEQ ID NO: 67405 - RNA, 19 nt, synthetic construct
  misc_feature 1..19: note = siRNA antisense sequence
  source 1..19: mol_type = other RNA
gctccttggcttctacaca

SEQ ID NO: 67406 - RNA, 19 nt, synthetic construct
  misc_feature 1..19: note = siRNA sense sequence
  source 1..19: mol_type = other RNA
gtgtagaagccaaggagca

SEQ ID NO: 67407 - RNA, 19 nt, synthetic construct
  misc_feature 1..19: note = siRNA antisense sequence
  source 1..19: mol_type = other RNA
tgctccttggcttctacac

SEQ ID NO: 67408 - RNA, 19 nt, synthetic construct
  misc_feature 1..19: note = siRNA sense sequence
  source 1..19: mol_type = other RNA
tgtagaagccaaggagcat

SEQ ID NO: 67409 - RNA, 19 nt, synthetic construct
  misc_feature 1..19: note = siRNA antisense sequence
  source 1..19: mol_type = other RNA
atgctccttggcttctaca

SEQ ID NO: 67410 - RNA, 19 nt, synthetic construct
  misc_feature 1..19: note = siRNA sense sequence
  source 1..19: mol_type = other RNA
gtagaagccaaggagcatt

SEQ ID NO: 67411 - RNA, 19 nt, synthetic construct
  misc_feature 1..19: note = siRNA antisense sequence
  source 1..19: mol_type = other RNA
aatgctccttggcttctac

SEQ ID NO: 67412 - RNA, 19 nt, synthetic construct
  misc_feature 1..19: note = siRNA sense sequence
  source 1..19: mol_type = other RNA
agaagccaaggagcattgt

SEQ ID NO: 67413 - RNA, 19 nt, synthetic construct
  misc_feature 1..19: note = siRNA antisense sequence
  source 1..19: mol_type = other RNA
acaatgctccttggcttct

SEQ ID NO: 67414 - RNA, 19 nt, synthetic construct
  misc_feature 1..19: note = siRNA sense sequence
  source 1..19: mol_type = other RNA
gaagccaaggagcattgta

SEQ ID NO: 67415 - RNA, 19 nt, synthetic construct
  misc_feature 1..19: note = siRNA antisense sequence
  source 1..19: mol_type = other RNA
tacaatgctccttggcttc

SEQ ID NO: 67416 - RNA, 19 nt, synthetic construct
  misc_feature 1..19: note = siRNA sense sequence
  source 1..19: mol_type = other RNA
aagccaaggagcattgtaa

SEQ ID NO: 67417 - RNA, 19 nt, synthetic construct
  misc_feature 1..19: note = siRNA antisense sequence
  source 1..19: mol_type = other RNA
ttacaatgctccttggctt

SEQ ID NO: 67418 - RNA, 19 nt, synthetic construct
  misc_feature 1..19: note = siRNA sense sequence
  source 1..19: mol_type = other RNA
agccaaggagcattgtaaa

SEQ ID NO: 67419 - RNA, 19 nt, synthetic construct
  misc_feature 1..19: note = siRNA antisense sequence
  source 1..19: mol_type = other RNA
tttacaatgctccttggct

SEQ ID NO: 67420 - RNA, 19 nt, synthetic construct
  misc_feature 1..19: note = siRNA sense sequence
  source 1..19: mol_type = other RNA
gccaaggagcattgtaaag

SEQ ID NO: 67421 - RNA, 19 nt, synthetic construct
  misc_feature 1..19: note = siRNA antisense sequence
  source 1..19: mol_type = other RNA
ctttacaatgctccttggc

SEQ ID NO: 67422 - RNA, 19 nt, synthetic construct
  misc_feature 1..19: note = siRNA sense sequence
  source 1..19: mol_type = other RNA
ccaaggagcattgtaaaga

SEQ ID NO: 67423 - RNA, 19 nt, synthetic construct
  misc_feature 1..19: note = siRNA antisense sequence
  source 1..19: mol_type = other RNA
tctttacaatgctccttgg

SEQ ID NO: 67424 - RNA, 19 nt, synthetic construct
  misc_feature 1..19: note = siRNA sense sequence
  source 1..19: mol_type = other RNA
caaggagcattgtaaagaa

SEQ ID NO: 67425 - RNA, 19 nt, synthetic construct
  misc_feature 1..19: note = siRNA antisense sequence
  source 1..19: mol_type = other RNA
ttctttacaatgctccttg

SEQ ID NO: 67426 - RNA, 19 nt, synthetic construct
  misc_feature 1..19: note = siRNA sense sequence
  source 1..19: mol_type = other RNA
aaggagcattgtaaagaag

SEQ ID NO: 67427 - RNA, 19 nt, synthetic construct
  misc_feature 1..19: note = siRNA antisense sequence
  source 1..19: mol_type = other RNA
cttctttacaatgctcctt

SEQ ID NO: 67428 - RNA, 19 nt, synthetic construct
  misc_feature 1..19: note = siRNA sense sequence
  source 1..19: mol_type = other RNA
agcattgtaaagaagcaaa

SEQ ID NO: 67429 - RNA, 19 nt, synthetic construct
  misc_feature 1..19: note = siRNA antisense sequence
  source 1..19: mol_type = other RNA
tttgcttctttacaatgct

SEQ ID NO: 67430 - RNA, 19 nt, synthetic construct
  misc_feature 1..19: note = siRNA sense sequence
  source 1..19: mol_type = other RNA
gcattgtaaagaagcaaaa

SEQ ID NO: 67431 - RNA, 19 nt, synthetic construct
  misc_feature 1..19: note = siRNA antisense sequence
  source 1..19: mol_type = other RNA
ttttgcttctttacaatgc

SEQ ID NO: 67432 - RNA, 19 nt, synthetic construct
  misc_feature 1..19: note = siRNA sense sequence
  source 1..19: mol_type = other RNA
tcagaagcaaagcagagtg

SEQ ID NO: 67433 - RNA, 19 nt, synthetic construct
  misc_feature 1..19: note = siRNA antisense sequence
  source 1..19: mol_type = other RNA
cactctgctttgcttctga

SEQ ID NO: 67434 - RNA, 19 nt, synthetic construct
  misc_feature 1..19: note = siRNA sense sequence
  source 1..19: mol_type = other RNA
agaagcaaagcagagtggg

SEQ ID NO: 67435 - RNA, 19 nt, synthetic construct
  misc_feature 1..19: note = siRNA antisense sequence
  source 1..19: mol_type = other RNA
cccactctgctttgcttct

SEQ ID NO: 67436 - RNA, 19 nt, synthetic construct
  misc_feature 1..19: note = siRNA sense sequence
  source 1..19: mol_type = other RNA
gcaaagcagagtgggaagg

SEQ ID NO: 67437 - RNA, 19 nt, synthetic construct
  misc_feature 1..19: note = siRNA antisense sequence
  source 1..19: mol_type = other RNA
ccttcccactctgctttgc

SEQ ID NO: 67438 - RNA, 19 nt, synthetic construct
  misc_feature 1..19: note = siRNA sense sequence
  source 1..19: mol_type = other RNA
aaaagtcttagaatccacc

SEQ ID NO: 67439 - RNA, 19 nt, synthetic construct
  misc_feature 1..19: note = siRNA antisense sequence
  source 1..19: mol_type = other RNA
ggtggattctaagactttt

SEQ ID NO: 67440 - RNA, 19 nt, synthetic construct
  misc_feature 1..19: note = siRNA sense sequence
  source 1..19: mol_type = other RNA
aaagtcttagaatccacca

SEQ ID NO: 67441 - RNA, 19 nt, synthetic construct
  misc_feature 1..19: note = siRNA antisense sequence
  source 1..19: mol_type = other RNA
tggtggattctaagacttt

SEQ ID NO: 67442 - RNA, 19 nt, synthetic construct
  misc_feature 1..19: note = siRNA sense sequence
  source 1..19: mol_type = other RNA
aagtcttagaatccaccac

SEQ ID NO: 67443 - RNA, 19 nt, synthetic construct
  misc_feature 1..19: note = siRNA antisense sequence
  source 1..19: mol_type = other RNA
gtggtggattctaagactt

SEQ ID NO: 67444 - RNA, 19 nt, synthetic construct
  misc_feature 1..19: note = siRNA sense sequence
  source 1..19: mol_type = other RNA
tagaatccaccacctgctt

SEQ ID NO: 67445 - RNA, 19 nt, synthetic construct
  misc_feature 1..19: note = siRNA antisense sequence
  source 1..19: mol_type = other RNA
aagcaggtggtggattcta

SEQ ID NO: 67446 - RNA, 19 nt, synthetic construct
  misc_feature 1..19: note = siRNA sense sequence
  source 1..19: mol_type = other RNA
agaatccaccacctgcttt

SEQ ID NO: 67447 - RNA, 19 nt, synthetic construct
  misc_feature 1..19: note = siRNA antisense sequence
  source 1..19: mol_type = other RNA
aaagcaggtggtggattct

SEQ ID NO: 67448 - RNA, 19 nt, synthetic construct
  misc_feature 1..19: note = siRNA sense sequence
  source 1..19: mol_type = other RNA
gaatccaccacctgctttt

SEQ ID NO: 67449 - RNA, 19 nt, synthetic construct
  misc_feature 1..19: note = siRNA antisense sequence
  source 1..19: mol_type = other RNA
aaaagcaggtggtggattc

SEQ ID NO: 67450 - RNA, 19 nt, synthetic construct
  misc_feature 1..19: note = siRNA sense sequence
  source 1..19: mol_type = other RNA
aatccaccacctgcttttg

SEQ ID NO: 67451 - RNA, 19 nt, synthetic construct
  misc_feature 1..19: note = siRNA antisense sequence
  source 1..19: mol_type = other RNA
caaaagcaggtggtggatt

SEQ ID NO: 67452 - RNA, 19 nt, synthetic construct
  misc_feature 1..19: note = siRNA sense sequence
  source 1..19: mol_type = other RNA
tccaccacctgcttttgtg

SEQ ID NO: 67453 - RNA, 19 nt, synthetic construct
  misc_feature 1..19: note = siRNA antisense sequence
  source 1..19: mol_type = other RNA
cacaaaagcaggtggtgga

SEQ ID NO: 67454 - RNA, 19 nt, synthetic construct
  misc_feature 1..19: note = siRNA sense sequence
  source 1..19: mol_type = other RNA
aaagccttgtctgtttatt

SEQ ID NO: 67455 - RNA, 19 nt, synthetic construct
  misc_feature 1..19: note = siRNA antisense sequence
  source 1..19: mol_type = other RNA
aataaacagacaaggcttt

SEQ ID NO: 67456 - RNA, 19 nt, synthetic construct
  misc_feature 1..19: note = siRNA sense sequence
  source 1..19: mol_type = other RNA
aagccttgtctgtttattt

SEQ ID NO: 67457 - RNA, 19 nt, synthetic construct
  misc_feature 1..19: note = siRNA antisense sequence
  source 1..19: mol_type = other RNA
aaataaacagacaaggctt

SEQ ID NO: 67458 - RNA, 19 nt, synthetic construct
  misc_feature 1..19: note = siRNA sense sequence
  source 1..19: mol_type = other RNA
agccttgtctgtttatttt

SEQ ID NO: 67459 - RNA, 19 nt, synthetic construct
  misc_feature 1..19: note = siRNA antisense sequence
  source 1..19: mol_type = other RNA
aaaataaacagacaaggct

SEQ ID NO: 67460 - RNA, 19 nt, synthetic construct
  misc_feature 1..19: note = siRNA sense sequence
  source 1..19: mol_type = other RNA
ttttgactcaggacatgca

SEQ ID NO: 67461 - RNA, 19 nt, synthetic construct
  misc_feature 1..19: note = siRNA antisense sequence
  source 1..19: mol_type = other RNA
tgcatgtcctgagtcaaaa

SEQ ID NO: 67462 - RNA, 19 nt, synthetic construct
  misc_feature 1..19: note = siRNA sense sequence
  source 1..19: mol_type = other RNA
aacttttatacttggctca

SEQ ID NO: 67463 - RNA, 19 nt, synthetic construct
  misc_feature 1..19: note = siRNA antisense sequence
  source 1..19: mol_type = other RNA
tgagccaagtataaaagtt

SEQ ID NO: 67464 - RNA, 19 nt, synthetic construct
  misc_feature 1..19: note = siRNA sense sequence
  source 1..19: mol_type = other RNA
acttttatacttggctcat

SEQ ID NO: 67465 - RNA, 19 nt, synthetic construct
  misc_feature 1..19: note = siRNA antisense sequence
  source 1..19: mol_type = other RNA
atgagccaagtataaaagt

SEQ ID NO: 67466 - RNA, 19 nt, synthetic construct
  misc_feature 1..19: note = siRNA sense sequence
  source 1..19: mol_type = other RNA
cttttatacttggctcata

SEQ ID NO: 67467 - RNA, 19 nt, synthetic construct
  misc_feature 1..19: note = siRNA antisense sequence
  source 1..19: mol_type = other RNA
tatgagccaagtataaaag

SEQ ID NO: 67468 - RNA, 19 nt, synthetic construct
  misc_feature 1..19: note = siRNA sense sequence
  source 1..19: mol_type = other RNA
ttatacttggctcatatga

SEQ ID NO: 67469 - RNA, 19 nt, synthetic construct
  misc_feature 1..19: note = siRNA antisense sequence
  source 1..19: mol_type = other RNA
tcatatgagccaagtataa

SEQ ID NO: 67470 - RNA, 19 nt, synthetic construct
  misc_feature 1..19: note = siRNA sense sequence
  source 1..19: mol_type = other RNA
tatacttggctcatatgaa

SEQ ID NO: 67471 - RNA, 19 nt, synthetic construct
  misc_feature 1..19: note = siRNA antisense sequence
  source 1..19: mol_type = other RNA
ttcatatgagccaagtata

SEQ ID NO: 67472 - RNA, 19 nt, synthetic construct
  misc_feature 1..19: note = siRNA sense sequence
  source 1..19: mol_type = other RNA
ttcatgtgtatttgttccg

SEQ ID NO: 67473 - RNA, 19 nt, synthetic construct
  misc_feature 1..19: note = siRNA antisense sequence
  source 1..19: mol_type = other RNA
cggaacaaatacacatgaa

SEQ ID NO: 67474 - RNA, 19 nt, synthetic construct
  misc_feature 1..19: note = siRNA sense sequence
  source 1..19: mol_type = other RNA
tcatgtgtatttgttccgt

SEQ ID NO: 67475 - RNA, 19 nt, synthetic construct
  misc_feature 1..19: note = siRNA antisense sequence
  source 1..19: mol_type = other RNA
acggaacaaatacacatga

SEQ ID NO: 67476 - RNA, 19 nt, synthetic construct
  misc_feature 1..19: note = siRNA sense sequence
  source 1..19: mol_type = other RNA
gtgtatttgttccgttacc

SEQ ID NO: 67477 - RNA, 19 nt, synthetic construct
  misc_feature 1..19: note = siRNA antisense sequence
  source 1..19: mol_type = other RNA
ggtaacggaacaaatacac

SEQ ID NO: 67478 - RNA, 19 nt, synthetic construct
  misc_feature 1..19: note = siRNA sense sequence
  source 1..19: mol_type = other RNA
tgtatttgttccgttaccg

SEQ ID NO: 67479 - RNA, 19 nt, synthetic construct
  misc_feature 1..19: note = siRNA antisense sequence
  source 1..19: mol_type = other RNA
cggtaacggaacaaataca

SEQ ID NO: 67480 - RNA, 19 nt, synthetic construct
  misc_feature 1..19: note = siRNA sense sequence
  source 1..19: mol_type = other RNA
gtatttgttccgttaccgc

SEQ ID NO: 67481 - RNA, 19 nt, synthetic construct
  misc_feature 1..19: note = siRNA antisense sequence
  source 1..19: mol_type = other RNA
gcggtaacggaacaaatac

SEQ ID NO: 67482 - RNA, 19 nt, synthetic construct
  misc_feature 1..19: note = siRNA sense sequence
  source 1..19: mol_type = other RNA
tatttgttccgttaccgcc

SEQ ID NO: 67483 - RNA, 19 nt, synthetic construct
  misc_feature 1..19: note = siRNA antisense sequence
  source 1..19: mol_type = other RNA
ggcggtaacggaacaaata

SEQ ID NO: 67484 - RNA, 19 nt, synthetic construct
  misc_feature 1..19: note = siRNA sense sequence
  source 1..19: mol_type = other RNA
atttgttccgttaccgcct

SEQ ID NO: 67485 - RNA, 19 nt, synthetic construct
  misc_feature 1..19: note = siRNA antisense sequence
  source 1..19: mol_type = other RNA
aggcggtaacggaacaaat

SEQ ID NO: 67486 - RNA, 19 nt, synthetic construct
  misc_feature 1..19: note = siRNA sense sequence
  source 1..19: mol_type = other RNA
tttgttccgttaccgcctt

SEQ ID NO: 67487 - RNA, 19 nt, synthetic construct
  misc_feature 1..19: note = siRNA antisense sequence
  source 1..19: mol_type = other RNA
aaggcggtaacggaacaaa

SEQ ID NO: 67488 - RNA, 19 nt, synthetic construct
  misc_feature 1..19: note = siRNA sense sequence
  source 1..19: mol_type = other RNA
ttgttccgttaccgccttt

SEQ ID NO: 67489 - RNA, 19 nt, synthetic construct
  misc_feature 1..19: note = siRNA antisense sequence
  source 1..19: mol_type = other RNA
aaaggcggtaacggaacaa

SEQ ID NO: 67490 - RNA, 19 nt, synthetic construct
  misc_feature 1..19: note = siRNA sense sequence
  source 1..19: mol_type = other RNA
tgttccgttaccgcctttt

SEQ ID NO: 67491 - RNA, 19 nt, synthetic construct
  misc_feature 1..19: note = siRNA antisense sequence
  source 1..19: mol_type = other RNA
aaaaggcggtaacggaaca

SEQ ID NO: 67492 - RNA, 19 nt, synthetic construct
  misc_feature 1..19: note = siRNA sense sequence
  source 1..19: mol_type = other RNA
gttccgttaccgccttttc

SEQ ID NO: 67493 - RNA, 19 nt, synthetic construct
  misc_feature 1..19: note = siRNA antisense sequence
  source 1..19: mol_type = other RNA
gaaaaggcggtaacggaac

SEQ ID NO: 67494 - RNA, 19 nt, synthetic construct
  misc_feature 1..19: note = siRNA sense sequence
  source 1..19: mol_type = other RNA
ttccgttaccgccttttct

SEQ ID NO: 67495 - RNA, 19 nt, synthetic construct
  misc_feature 1..19: note = siRNA antisense sequence
  source 1..19: mol_type = other RNA
agaaaaggcggtaacggaa

SEQ ID NO: 67496 - RNA, 19 nt, synthetic construct
  misc_feature 1..19: note = siRNA sense sequence
  source 1..19: mol_type = other RNA
tccgttaccgccttttctt

SEQ ID NO: 67497 - RNA, 19 nt, synthetic construct
  misc_feature 1..19: note = siRNA antisense sequence
  source 1..19: mol_type = other RNA
aagaaaaggcggtaacgga

SEQ ID NO: 67498 - RNA, 19 nt, synthetic construct
  misc_feature 1..19: note = siRNA sense sequence
  source 1..19: mol_type = other RNA
ccgttaccgccttttcttc

SEQ ID NO: 67499 - RNA, 19 nt, synthetic construct
  misc_feature 1..19: note = siRNA antisense sequence
  source 1..19: mol_type = other RNA
gaagaaaaggcggtaacgg

SEQ ID NO: 67500 - RNA, 19 nt, synthetic construct
  misc_feature 1..19: note = siRNA sense sequence
  source 1..19: mol_type = other RNA
taccgccttttcttcatct

SEQ ID NO: 67501 - RNA, 19 nt, synthetic construct
  misc_feature 1..19: note = siRNA antisense sequence
  source 1..19: mol_type = other RNA
agatgaagaaaaggcggta

SEQ ID NO: 67502 - RNA, 19 nt, synthetic construct
  misc_feature 1..19: note = siRNA sense sequence
  source 1..19: mol_type = other RNA
accgccttttcttcatcta

SEQ ID NO: 67503 - RNA, 19 nt, synthetic construct
  misc_feature 1..19: note = siRNA antisense sequence
  source 1..19: mol_type = other RNA
tagatgaagaaaaggcggt

SEQ ID NO: 67504 - RNA, 19 nt, synthetic construct
  misc_feature 1..19: note = siRNA sense sequence
  source 1..19: mol_type = other RNA
ccaactagatgatggcata

SEQ ID NO: 67505 - RNA, 19 nt, synthetic construct
  misc_feature 1..19: note = siRNA antisense sequence
  source 1..19: mol_type = other RNA
tatgccatcatctagttgg

SEQ ID NO: 67506 - RNA, 19 nt, synthetic construct
  misc_feature 1..19: note = siRNA sense sequence
  source 1..19: mol_type = other RNA
caactagatgatggcataa

SEQ ID NO: 67507 - RNA, 19 nt, synthetic construct
  misc_feature 1..19: note = siRNA antisense sequence
  source 1..19: mol_type = other RNA
ttatgccatcatctagttg

SEQ ID NO: 67508 - RNA, 19 nt, synthetic construct
  misc_feature 1..19: note = siRNA sense sequence
  source 1..19: mol_type = other RNA
aactagatgatggcataat

SEQ ID NO: 67509 - RNA, 19 nt, synthetic construct
  misc_feature 1..19: note = siRNA antisense sequence
  source 1..19: mol_type = other RNA
attatgccatcatctagtt

SEQ ID NO: 67510 - RNA, 19 nt, synthetic construct
  misc_feature 1..19: note = siRNA sense sequence
  source 1..19: mol_type = other RNA
actagatgatggcataata

SEQ ID NO: 67511 - RNA, 19 nt, synthetic construct
  misc_feature 1..19: note = siRNA antisense sequence
  source 1..19: mol_type = other RNA
tattatgccatcatctagt

SEQ ID NO: 67512 - RNA, 19 nt, synthetic construct
  misc_feature 1..19: note = siRNA sense sequence
  source 1..19: mol_type = other RNA
ctagatgatggcataatag

SEQ ID NO: 67513 - RNA, 19 nt, synthetic construct
  misc_feature 1..19: note = siRNA antisense sequence
  source 1..19: mol_type = other RNA
ctattatgccatcatctag

SEQ ID NO: 67514 - RNA, 19 nt, synthetic construct
  misc_feature 1..19: note = siRNA sense sequence
  source 1..19: mol_type = other RNA
tagatgatggcataataga

SEQ ID NO: 67515 - RNA, 19 nt, synthetic construct
  misc_feature 1..19: note = siRNA antisense sequence
  source 1..19: mol_type = other RNA
tctattatgccatcatcta

SEQ ID NO: 67516 - RNA, 19 nt, synthetic construct
  misc_feature 1..19: note = siRNA sense sequence
  source 1..19: mol_type = other RNA
agatgatggcataatagaa

SEQ ID NO: 67517 - RNA, 19 nt, synthetic construct
  misc_feature 1..19: note = siRNA antisense sequence
  source 1..19: mol_type = other RNA
ttctattatgccatcatct

SEQ ID NO: 67518 - RNA, 19 nt, synthetic construct
  misc_feature 1..19: note = siRNA sense sequence
  source 1..19: mol_type = other RNA
gatgatggcataatagaag

SEQ ID NO: 67519 - RNA, 19 nt, synthetic construct
  misc_feature 1..19: note = siRNA antisense sequence
  source 1..19: mol_type = other RNA
cttctattatgccatcatc

SEQ ID NO: 67520 - RNA, 19 nt, synthetic construct
  misc_feature 1..19: note = siRNA sense sequence
  source 1..19: mol_type = other RNA
atgatggcataatagaaga

SEQ ID NO: 67521 - RNA, 19 nt, synthetic construct
  misc_feature 1..19: note = siRNA antisense sequence
  source 1..19: mol_type = other RNA
tcttctattatgccatcat

SEQ ID NO: 67522 - RNA, 19 nt, synthetic construct
  misc_feature 1..19: note = siRNA sense sequence
  source 1..19: mol_type = other RNA
tgatggcataatagaagac

SEQ ID NO: 67523 - RNA, 19 nt, synthetic construct
  misc_feature 1..19: note = siRNA antisense sequence
  source 1..19: mol_type = other RNA
gtcttctattatgccatca

SEQ ID NO: 67524 - RNA, 19 nt, synthetic construct
  misc_feature 1..19: note = siRNA sense sequence
  source 1..19: mol_type = other RNA
gatggcataatagaagaca

SEQ ID NO: 67525 - RNA, 19 nt, synthetic construct
  misc_feature 1..19: note = siRNA antisense sequence
  source 1..19: mol_type = other RNA
tgtcttctattatgccatc

SEQ ID NO: 67526 - RNA, 19 nt, synthetic construct
  misc_feature 1..19: note = siRNA sense sequence
  source 1..19: mol_type = other RNA
gcataatagaagacatgag

SEQ ID NO: 67527 - RNA, 19 nt, synthetic construct
  misc_feature 1..19: note = siRNA antisense sequence
  source 1..19: mol_type = other RNA
ctcatgtcttctattatgc

SEQ ID NO: 67528 - RNA, 19 nt, synthetic construct
  misc_feature 1..19: note = siRNA sense sequence
  source 1..19: mol_type = other RNA
atagaagacatgagccctg

SEQ ID NO: 67529 - RNA, 19 nt, synthetic construct
  misc_feature 1..19: note = siRNA antisense sequence
  source 1..19: mol_type = other RNA
cagggctcatgtcttctat

SEQ ID NO: 67530 - RNA, 19 nt, synthetic construct
  misc_feature 1..19: note = siRNA sense sequence
  source 1..19: mol_type = other RNA
tagaagacatgagccctga

SEQ ID NO: 67531 - RNA, 19 nt, synthetic construct
  misc_feature 1..19: note = siRNA antisense sequence
  source 1..19: mol_type = other RNA
tcagggctcatgtcttcta

SEQ ID NO: 67532 - RNA, 19 nt, synthetic construct
  misc_feature 1..19: note = siRNA sense sequence
  source 1..19: mol_type = other RNA
agaagacatgagccctgaa

SEQ ID NO: 67533 - RNA, 19 nt, synthetic construct
  misc_feature 1..19: note = siRNA antisense sequence
  source 1..19: mol_type = other RNA
ttcagggctcatgtcttct

SEQ ID NO: 67534 - RNA, 19 nt, synthetic construct
  misc_feature 1..19: note = siRNA sense sequence
  source 1..19: mol_type = other RNA
gacatgagccctgaataaa

SEQ ID NO: 67535 - RNA, 19 nt, synthetic construct
  misc_feature 1..19: note = siRNA antisense sequence
  source 1..19: mol_type = other RNA
tttattcagggctcatgtc

SEQ ID NO: 67536 - RNA, 19 nt, synthetic construct
  misc_feature 1..19: note = siRNA sense sequence
  source 1..19: mol_type = other RNA
acatgagccctgaataaaa

SEQ ID NO: 67537 - RNA, 19 nt, synthetic construct
  misc_feature 1..19: note = siRNA antisense sequence
  source 1..19: mol_type = other RNA
ttttattcagggctcatgt

SEQ ID NO: 67538 - RNA, 19 nt, synthetic construct
  misc_feature 1..19: note = siRNA sense sequence
  source 1..19: mol_type = other RNA
tttccaacctaaaagtgca

SEQ ID NO: 67539 - RNA, 19 nt, synthetic construct
  misc_feature 1..19: note = siRNA antisense sequence
  source 1..19: mol_type = other RNA
tgcacttttaggttggaaa

SEQ ID NO: 67540 - RNA, 19 nt, synthetic construct
  misc_feature 1..19: note = siRNA sense sequence
  source 1..19: mol_type = other RNA
caacctaaaagtgcatatt

SEQ ID NO: 67541 - RNA, 19 nt, synthetic construct
  misc_feature 1..19: note = siRNA antisense sequence
  source 1..19: mol_type = other RNA
aatatgcacttttaggttg

SEQ ID NO: 67542 - RNA, 19 nt, synthetic construct
  misc_feature 1..19: note = siRNA sense sequence
  source 1..19: mol_type = other RNA
cctctaagccctcagttgt

SEQ ID NO: 67543 - RNA, 19 nt, synthetic construct
  misc_feature 1..19: note = siRNA antisense sequence
  source 1..19: mol_type = other RNA
acaactgagggcttagagg

SEQ ID NO: 67544 - RNA, 19 nt, synthetic construct
  misc_feature 1..19: note = siRNA sense sequence
  source 1..19: mol_type = other RNA
ctctaagccctcagttgtt

SEQ ID NO: 67545 - RNA, 19 nt, synthetic construct
  misc_feature 1..19: note = siRNA antisense sequence
  source 1..19: mol_type = other RNA
aacaactgagggcttagag

SEQ ID NO: 67546 - RNA, 19 nt, synthetic construct
  misc_feature 1..19: note = siRNA sense sequence
  source 1..19: mol_type = other RNA
tctaagccctcagttgttt

SEQ ID NO: 67547 - RNA, 19 nt, synthetic construct
  misc_feature 1..19: note = siRNA antisense sequence
  source 1..19: mol_type = other RNA
aaacaactgagggcttaga

SEQ ID NO: 67548 - RNA, 19 nt, synthetic construct
  misc_feature 1..19: note = siRNA sense sequence
  source 1..19: mol_type = other RNA
ctaagccctcagttgttta

SEQ ID NO: 67549 - RNA, 19 nt, synthetic construct
  misc_feature 1..19: note = siRNA antisense sequence
  source 1..19: mol_type = other RNA
taaacaactgagggcttag

SEQ ID NO: 67550 - RNA, 19 nt, synthetic construct
  misc_feature 1..19: note = siRNA sense sequence
  source 1..19: mol_type = other RNA
taagccctcagttgtttaa

SEQ ID NO: 67551 - RNA, 19 nt, synthetic construct
  misc_feature 1..19: note = siRNA antisense sequence
  source 1..19: mol_type = other RNA
ttaaacaactgagggctta

SEQ ID NO: 67552 - RNA, 19 nt, synthetic construct
  misc_feature 1..19: note = siRNA sense sequence
  source 1..19: mol_type = other RNA
gccctcagttgtttaataa

SEQ ID NO: 67553 - RNA, 19 nt, synthetic construct
  misc_feature 1..19: note = siRNA antisense sequence
  source 1..19: mol_type = other RNA
ttattaaacaactgagggc

SEQ ID NO: 67554 - RNA, 19 nt, synthetic construct
  misc_feature 1..19: note = siRNA sense sequence
  source 1..19: mol_type = other RNA
cacatagttccctggcata

SEQ ID NO: 67555 - RNA, 19 nt, synthetic construct
  misc_feature 1..19: note = siRNA antisense sequence
  source 1..19: mol_type = other RNA
tatgccagggaactatgtg

SEQ ID NO: 67556 - RNA, 19 nt, synthetic construct
  misc_feature 1..19: note = siRNA sense sequence
  source 1..19: mol_type = other RNA
acatagttccctggcataa

SEQ ID NO: 67557 - RNA, 19 nt, synthetic construct
  misc_feature 1..19: note = siRNA antisense sequence
  source 1..19: mol_type = other RNA
ttatgccagggaactatgt

SEQ ID NO: 67558 - RNA, 19 nt, synthetic construct
  misc_feature 1..19: note = siRNA sense sequence
  source 1..19: mol_type = other RNA
catagttccctggcataat

SEQ ID NO: 67559 - RNA, 19 nt, synthetic construct
  misc_feature 1..19: note = siRNA antisense sequence
  source 1..19: mol_type = other RNA
attatgccagggaactatg

SEQ ID NO: 67560 - RNA, 19 nt, synthetic construct
  misc_feature 1..19: note = siRNA sense sequence
  source 1..19: mol_type = other RNA
atagttccctggcataatt

SEQ ID NO: 67561 - RNA, 19 nt, synthetic construct
  misc_feature 1..19: note = siRNA antisense sequence
  source 1..19: mol_type = other RNA
aattatgccagggaactat

SEQ ID NO: 67562 - RNA, 19 nt, synthetic construct
  misc_feature 1..19: note = siRNA sense sequence
  source 1..19: mol_type = other RNA
tagttccctggcataattt

SEQ ID NO: 67563 - RNA, 19 nt, synthetic construct
  misc_feature 1..19: note = siRNA antisense sequence
  source 1..19: mol_type = other RNA
aaattatgccagggaacta

SEQ ID NO: 67564 - RNA, 19 nt, synthetic construct
  misc_feature 1..19: note = siRNA sense sequence
  source 1..19: mol_type = other RNA
agttccctggcataatttg

SEQ ID NO: 67565 - RNA, 19 nt, synthetic construct
  misc_feature 1..19: note = siRNA antisense sequence
  source 1..19: mol_type = other RNA
caaattatgccagggaact

SEQ ID NO: 67566 - RNA, 19 nt, synthetic construct
  misc_feature 1..19: note = siRNA sense sequence
  source 1..19: mol_type = other RNA
gattaaaatgatgtagagg

SEQ ID NO: 67567 - RNA, 19 nt, synthetic construct
  misc_feature 1..19: note = siRNA antisense sequence
  source 1..19: mol_type = other RNA
cctctacatcattttaatc

SEQ ID NO: 67568 - RNA, 19 nt, synthetic construct
  misc_feature 1..19: note = siRNA sense sequence
  source 1..19: mol_type = other RNA
ttaaaatgatgtagaggtg

SEQ ID NO: 67569 - RNA, 19 nt, synthetic construct
  misc_feature 1..19: note = siRNA antisense sequence
  source 1..19: mol_type = other RNA
cacctctacatcattttaa

SEQ ID NO: 67570 - RNA, 19 nt, synthetic construct
  misc_feature 1..19: note = siRNA sense sequence
  source 1..19: mol_type = other RNA
taaaatgatgtagaggtgc

SEQ ID NO: 67571 - RNA, 19 nt, synthetic construct
  misc_feature 1..19: note = siRNA antisense sequence
  source 1..19: mol_type = other RNA
gcacctctacatcatttta

SEQ ID NO: 67572 - RNA, 19 nt, synthetic construct
  misc_feature 1..19: note = siRNA sense sequence
  source 1..19: mol_type = other RNA
aaaatgatgtagaggtgcc

SEQ ID NO: 67573 - RNA, 19 nt, synthetic construct
  misc_feature 1..19: note = siRNA antisense sequence
  source 1..19: mol_type = other RNA
ggcacctctacatcatttt

SEQ ID NO: 67574 - RNA, 19 nt, synthetic construct
  misc_feature 1..19: note = siRNA sense sequence
  source 1..19: mol_type = other RNA
aaatgatgtagaggtgcca

SEQ ID NO: 67575 - RNA, 19 nt, synthetic construct
  misc_feature 1..19: note = siRNA antisense sequence
  source 1..19: mol_type = other RNA
tggcacctctacatcattt

SEQ ID NO: 67576 - RNA, 19 nt, synthetic construct
  misc_feature 1..19: note = siRNA sense sequence
  source 1..19: mol_type = other RNA
aatgatgtagaggtgccac

SEQ ID NO: 67577 - RNA, 19 nt, synthetic construct
  misc_feature 1..19: note = siRNA antisense sequence
  source 1..19: mol_type = other RNA
gtggcacctctacatcatt

SEQ ID NO: 67578 - RNA, 19 nt, synthetic construct
  misc_feature 1..19: note = siRNA sense sequence
  source 1..19: mol_type = other RNA
atgatgtagaggtgccaca

SEQ ID NO: 67579 - RNA, 19 nt, synthetic construct
  misc_feature 1..19: note = siRNA antisense sequence
  source 1..19: mol_type = other RNA
tgtggcacctctacatcat

SEQ ID NO: 67580 - RNA, 19 nt, synthetic construct
  misc_feature 1..19: note = siRNA sense sequence
  source 1..19: mol_type = other RNA
tgatgtagaggtgccacac

SEQ ID NO: 67581 - RNA, 19 nt, synthetic construct
  misc_feature 1..19: note = siRNA antisense sequence
  source 1..19: mol_type = other RNA
gtgtggcacctctacatca

SEQ ID NO: 67582 - RNA, 19 nt, synthetic construct
  misc_feature 1..19: note = siRNA sense sequence
  source 1..19: mol_type = other RNA
gatgtagaggtgccacact

SEQ ID NO: 67583 - RNA, 19 nt, synthetic construct
  misc_feature 1..19: note = siRNA antisense sequence
  source 1..19: mol_type = other RNA
agtgtggcacctctacatc

SEQ ID NO: 67584 - RNA, 19 nt, synthetic construct
  misc_feature 1..19: note = siRNA sense sequence
  source 1..19: mol_type = other RNA
atgtagaggtgccacactt

SEQ ID NO: 67585 - RNA, 19 nt, synthetic construct
  misc_feature 1..19: note = siRNA antisense sequence
  source 1..19: mol_type = other RNA
aagtgtggcacctctacat

SEQ ID NO: 67586 - RNA, 19 nt, synthetic construct
  misc_feature 1..19: note = siRNA sense sequence
  source 1..19: mol_type = other RNA
tgccacacttttaaagaat

SEQ ID NO: 67587 - RNA, 19 nt, synthetic construct
  misc_feature 1..19: note = siRNA antisense sequence
  source 1..19: mol_type = other RNA
attctttaaaagtgtggca

SEQ ID NO: 67588 - RNA, 19 nt, synthetic construct
  misc_feature 1..19: note = siRNA sense sequence
  source 1..19: mol_type = other RNA
gccacacttttaaagaatt

SEQ ID NO: 67589 - RNA, 19 nt, synthetic construct
  misc_feature 1..19: note = siRNA antisense sequence
  source 1..19: mol_type = other RNA
aattctttaaaagtgtggc

SEQ ID NO: 67590 - RNA, 19 nt, synthetic construct
  misc_feature 1..19: note = siRNA sense sequence
  source 1..19: mol_type = other RNA
aaagaattaactcattgcc

SEQ ID NO: 67591 - RNA, 19 nt, synthetic construct
  misc_feature 1..19: note = siRNA antisense sequence
  source 1..19: mol_type = other RNA
ggcaatgagttaattcttt

SEQ ID NO: 67592 - RNA, 19 nt, synthetic construct
  misc_feature 1..19: note = siRNA sense sequence
  source 1..19: mol_type = other RNA
aagaattaactcattgcct

SEQ ID NO: 67593 - RNA, 19 nt, synthetic construct
  misc_feature 1..19: note = siRNA antisense sequence
  source 1..19: mol_type = other RNA
aggcaatgagttaattctt

SEQ ID NO: 67594 - RNA, 19 nt, synthetic construct
  misc_feature 1..19: note = siRNA sense sequence
  source 1..19: mol_type = other RNA
attaactcattgcctttgc

SEQ ID NO: 67595 - RNA, 19 nt, synthetic construct
  misc_feature 1..19: note = siRNA antisense sequence
  source 1..19: mol_type = other RNA
gcaaaggcaatgagttaat

SEQ ID NO: 67596 - RNA, 19 nt, synthetic construct
  misc_feature 1..19: note = siRNA sense sequence
  source 1..19: mol_type = other RNA
ttaactcattgcctttgct

SEQ ID NO: 67597 - RNA, 19 nt, synthetic construct
  misc_feature 1..19: note = siRNA antisense sequence
  source 1..19: mol_type = other RNA
agcaaaggcaatgagttaa

SEQ ID NO: 67598 - RNA, 19 nt, synthetic construct
  misc_feature 1..19: note = siRNA sense sequence
  source 1..19: mol_type = other RNA
taactcattgcctttgctc

SEQ ID NO: 67599 - RNA, 19 nt, synthetic construct
  misc_feature 1..19: note = siRNA antisense sequence
  source 1..19: mol_type = other RNA
gagcaaaggcaatgagtta

SEQ ID NO: 67600 - RNA, 19 nt, synthetic construct
  misc_feature 1..19: note = siRNA sense sequence
  source 1..19: mol_type = other RNA
aactcattgcctttgctcg

SEQ ID NO: 67601 - RNA, 19 nt, synthetic construct
  misc_feature 1..19: note = siRNA antisense sequence
  source 1..19: mol_type = other RNA
cgagcaaaggcaatgagtt

SEQ ID NO: 67602 - RNA, 19 nt, synthetic construct
  misc_feature 1..19: note = siRNA sense sequence
  source 1..19: mol_type = other RNA
actcattgcctttgctcga

SEQ ID NO: 67603 - RNA, 19 nt, synthetic construct
  misc_feature 1..19: note = siRNA antisense sequence
  source 1..19: mol_type = other RNA
tcgagcaaaggcaatgagt

SEQ ID NO: 67604 - RNA, 19 nt, synthetic construct
  misc_feature 1..19: note = siRNA sense sequence
  source 1..19: mol_type = other RNA
ctcattgcctttgctcgat

SEQ ID NO: 67605 - RNA, 19 nt, synthetic construct
  misc_feature 1..19: note = siRNA antisense sequence
  source 1..19: mol_type = other RNA
atcgagcaaaggcaatgag

SEQ ID NO: 67606 - RNA, 19 nt, synthetic construct
  misc_feature 1..19: note = siRNA sense sequence
  source 1..19: mol_type = other RNA
ttgcctttgctcgatctat

SEQ ID NO: 67607 - RNA, 19 nt, synthetic construct
  misc_feature 1..19: note = siRNA antisense sequence
  source 1..19: mol_type = other RNA
atagatcgagcaaaggcaa

SEQ ID NO: 67608 - RNA, 19 nt, synthetic construct
  misc_feature 1..19: note = siRNA sense sequence
  source 1..19: mol_type = other RNA
tgcctttgctcgatctatt

SEQ ID NO: 67609 - RNA, 19 nt, synthetic construct
  misc_feature 1..19: note = siRNA antisense sequence
  source 1..19: mol_type = other RNA
aatagatcgagcaaaggca

SEQ ID NO: 67610 - RNA, 19 nt, synthetic construct
  misc_feature 1..19: note = siRNA sense sequence
  source 1..19: mol_type = other RNA
gcctttgctcgatctatta

SEQ ID NO: 67611 - RNA, 19 nt, synthetic construct
  misc_feature 1..19: note = siRNA antisense sequence
  source 1..19: mol_type = other RNA
taatagatcgagcaaaggc

SEQ ID NO: 67612 - RNA, 19 nt, synthetic construct
  misc_feature 1..19: note = siRNA sense sequence
  source 1..19: mol_type = other RNA
tgctcgatctattatagcc

SEQ ID NO: 67613 - RNA, 19 nt, synthetic construct
  misc_feature 1..19: note = siRNA antisense sequence
  source 1..19: mol_type = other RNA
ggctataatagatcgagca

SEQ ID NO: 67614 - RNA, 19 nt, synthetic construct
  misc_feature 1..19: note = siRNA sense sequence
  source 1..19: mol_type = other RNA
gctcgatctattatagccc

SEQ ID NO: 67615 - RNA, 19 nt, synthetic construct
  misc_feature 1..19: note = siRNA antisense sequence
  source 1..19: mol_type = other RNA
gggctataatagatcgagc

SEQ ID NO: 67616 - RNA, 19 nt, synthetic construct
  misc_feature 1..19: note = siRNA sense sequence
  source 1..19: mol_type = other RNA
aatcacttacctatgaccc

SEQ ID NO: 67617 - RNA, 19 nt, synthetic construct
  misc_feature 1..19: note = siRNA antisense sequence
  source 1..19: mol_type = other RNA
gggtcataggtaagtgatt

SEQ ID NO: 67618 - RNA, 19 nt, synthetic construct
  misc_feature 1..19: note = siRNA sense sequence
  source 1..19: mol_type = other RNA
atcacttacctatgaccct

SEQ ID NO: 67619 - RNA, 19 nt, synthetic construct
  misc_feature 1..19: note = siRNA antisense sequence
  source 1..19: mol_type = other RNA
agggtcataggtaagtgat

SEQ ID NO: 67620 - RNA, 19 nt, synthetic construct
  misc_feature 1..19: note = siRNA sense sequence
  source 1..19: mol_type = other RNA
tcacttacctatgaccctt

SEQ ID NO: 67621 - RNA, 19 nt, synthetic construct
  misc_feature 1..19: note = siRNA antisense sequence
  source 1..19: mol_type = other RNA
aagggtcataggtaagtga

SEQ ID NO: 67622 - RNA, 19 nt, synthetic construct
  misc_feature 1..19: note = siRNA sense sequence
  source 1..19: mol_type = other RNA
cacttacctatgaccctta

SEQ ID NO: 67623 - RNA, 19 nt, synthetic construct
  misc_feature 1..19: note = siRNA antisense sequence
  source 1..19: mol_type = other RNA
taagggtcataggtaagtg

SEQ ID NO: 67624 - RNA, 19 nt, synthetic construct
  misc_feature 1..19: note = siRNA sense sequence
  source 1..19: mol_type = other RNA
acttacctatgacccttaa

SEQ ID NO: 67625 - RNA, 19 nt, synthetic construct
  misc_feature 1..19: note = siRNA antisense sequence
  source 1..19: mol_type = other RNA
ttaagggtcataggtaagt

SEQ ID NO: 67626 - RNA, 19 nt, synthetic construct
  misc_feature 1..19: note = siRNA sense sequence
  source 1..19: mol_type = other RNA
cttacctatgacccttaat

SEQ ID NO: 67627 - RNA, 19 nt, synthetic construct
  misc_feature 1..19: note = siRNA antisense sequence
  source 1..19: mol_type = other RNA
attaagggtcataggtaag

SEQ ID NO: 67628 - RNA, 19 nt, synthetic construct
  misc_feature 1..19: note = siRNA sense sequence
  source 1..19: mol_type = other RNA
ttacctatgacccttaatt

SEQ ID NO: 67629 - RNA, 19 nt, synthetic construct
  misc_feature 1..19: note = siRNA antisense sequence
  source 1..19: mol_type = other RNA
aattaagggtcataggtaa

SEQ ID NO: 67630 - RNA, 19 nt, synthetic construct
  misc_feature 1..19: note = siRNA sense sequence
  source 1..19: mol_type = other RNA
tacctatgacccttaattt

SEQ ID NO: 67631 - RNA, 19 nt, synthetic construct
  misc_feature 1..19: note = siRNA antisense sequence
  source 1..19: mol_type = other RNA
aaattaagggtcataggta

SEQ ID NO: 67632 - RNA, 19 nt, synthetic construct
  misc_feature 1..19: note = siRNA sense sequence
  source 1..19: mol_type = other RNA
acctatgacccttaatttt

SEQ ID NO: 67633 - RNA, 19 nt, synthetic construct
  misc_feature 1..19: note = siRNA antisense sequence
  source 1..19: mol_type = other RNA
aaaattaagggtcataggt

SEQ ID NO: 67634 - RNA, 19 nt, synthetic construct
  misc_feature 1..19: note = siRNA sense sequence
  source 1..19: mol_type = other RNA
cctatgacccttaattttc

SEQ ID NO: 67635 - RNA, 19 nt, synthetic construct
  misc_feature 1..19: note = siRNA antisense sequence
  source 1..19: mol_type = other RNA
gaaaattaagggtcatagg

SEQ ID NO: 67636 - RNA, 19 nt, synthetic construct
  misc_feature 1..19: note = siRNA sense sequence
  source 1..19: mol_type = other RNA
ctatgacccttaattttct

SEQ ID NO: 67637 - RNA, 19 nt, synthetic construct
  misc_feature 1..19: note = siRNA antisense sequence
  source 1..19: mol_type = other RNA
agaaaattaagggtcatag

SEQ ID NO: 67638 - RNA, 19 nt, synthetic construct
  misc_feature 1..19: note = siRNA sense sequence
  source 1..19: mol_type = other RNA
aggttagataattgcaaag

SEQ ID NO: 67639 - RNA, 19 nt, synthetic construct
  misc_feature 1..19: note = siRNA antisense sequence
  source 1..19: mol_type = other RNA
ctttgcaattatctaacct

SEQ ID NO: 67640 - RNA, 19 nt, synthetic construct
  misc_feature 1..19: note = siRNA sense sequence
  source 1..19: mol_type = other RNA
ggttagataattgcaaaga

SEQ ID NO: 67641 - RNA, 19 nt, synthetic construct
  misc_feature 1..19: note = siRNA antisense sequence
  source 1..19: mol_type = other RNA
tctttgcaattatctaacc

SEQ ID NO: 67642 - RNA, 19 nt, synthetic construct
  misc_feature 1..19: note = siRNA sense sequence
  source 1..19: mol_type = other RNA
tagataattgcaaagatcc

SEQ ID NO: 67643 - RNA, 19 nt, synthetic construct
  misc_feature 1..19: note = siRNA antisense sequence
  source 1..19: mol_type = other RNA
ggatctttgcaattatcta

SEQ ID NO: 67644 - RNA, 19 nt, synthetic construct
  misc_feature 1..19: note = siRNA sense sequence
  source 1..19: mol_type = other RNA
agataattgcaaagatccc

SEQ ID NO: 67645 - RNA, 19 nt, synthetic construct
  misc_feature 1..19: note = siRNA antisense sequence
  source 1..19: mol_type = other RNA
gggatctttgcaattatct

SEQ ID NO: 67646 - RNA, 19 nt, synthetic construct
  misc_feature 1..19: note = siRNA sense sequence
  source 1..19: mol_type = other RNA
aattgcaaagatcccttct

SEQ ID NO: 67647 - RNA, 19 nt, synthetic construct
  misc_feature 1..19: note = siRNA antisense sequence
  source 1..19: mol_type = other RNA
agaagggatctttgcaatt

SEQ ID NO: 67648 - RNA, 19 nt, synthetic construct
  misc_feature 1..19: note = siRNA sense sequence
  source 1..19: mol_type = other RNA
attgcaaagatcccttcta

SEQ ID NO: 67649 - RNA, 19 nt, synthetic construct
  misc_feature 1..19: note = siRNA antisense sequence
  source 1..19: mol_type = other RNA
tagaagggatctttgcaat

SEQ ID NO: 67650 - RNA, 19 nt, synthetic construct
  misc_feature 1..19: note = siRNA sense sequence
  source 1..19: mol_type = other RNA
ttgcaaagatcccttctat

SEQ ID NO: 67651 - RNA, 19 nt, synthetic construct
  misc_feature 1..19: note = siRNA antisense sequence
  source 1..19: mol_type = other RNA
atagaagggatctttgcaa

SEQ ID NO: 67652 - RNA, 19 nt, synthetic construct
  misc_feature 1..19: note = siRNA sense sequence
  source 1..19: mol_type = other RNA
tgcaaagatcccttctatc

SEQ ID NO: 67653 - RNA, 19 nt, synthetic construct
  misc_feature 1..19: note = siRNA antisense sequence
  source 1..19: mol_type = other RNA
gatagaagggatctttgca

SEQ ID NO: 67654 - RNA, 19 nt, synthetic construct
  misc_feature 1..19: note = siRNA sense sequence
  source 1..19: mol_type = other RNA
gcaaagatcccttctatcc

SEQ ID NO: 67655 - RNA, 19 nt, synthetic construct
  misc_feature 1..19: note = siRNA antisense sequence
  source 1..19: mol_type = other RNA
ggatagaagggatctttgc

SEQ ID NO: 67656 - RNA, 19 nt, synthetic construct
  misc_feature 1..19: note = siRNA sense sequence
  source 1..19: mol_type = other RNA
caaagatcccttctatccc

SEQ ID NO: 67657 - RNA, 19 nt, synthetic construct
  misc_feature 1..19: note = siRNA antisense sequence
  source 1..19: mol_type = other RNA
gggatagaagggatctttg

SEQ ID NO: 67658 - RNA, 19 nt, synthetic construct
  misc_feature 1..19: note = siRNA sense sequence
  source 1..19: mol_type = other RNA
ttgttattctataggatgg

SEQ ID NO: 67659 - RNA, 19 nt, synthetic construct
  misc_feature 1..19: note = siRNA antisense sequence
  source 1..19: mol_type = other RNA
ccatcctatagaataacaa

SEQ ID NO: 67660 - RNA, 19 nt, synthetic construct
  misc_feature 1..19: note = siRNA sense sequence
  source 1..19: mol_type = other RNA
tgttattctataggatggg

SEQ ID NO: 67661 - RNA, 19 nt, synthetic construct
  misc_feature 1..19: note = siRNA antisense sequence
  source 1..19: mol_type = other RNA
cccatcctatagaataaca

SEQ ID NO: 67662 - RNA, 19 nt, synthetic construct
  misc_feature 1..19: note = siRNA sense sequence
  source 1..19: mol_type = other RNA
gttattctataggatggga

SEQ ID NO: 67663 - RNA, 19 nt, synthetic construct
  misc_feature 1..19: note = siRNA antisense sequence
  source 1..19: mol_type = other RNA
tcccatcctatagaataac

SEQ ID NO: 67664 - RNA, 19 nt, synthetic construct
  misc_feature 1..19: note = siRNA sense sequence
  source 1..19: mol_type = other RNA
ttattctataggatgggaa

SEQ ID NO: 67665 - RNA, 19 nt, synthetic construct
  misc_feature 1..19: note = siRNA antisense sequence
  source 1..19: mol_type = other RNA
ttcccatcctatagaataa

SEQ ID NO: 67666 - RNA, 19 nt, synthetic construct
  misc_feature 1..19: note = siRNA sense sequence
  source 1..19: mol_type = other RNA
cccaaattgcaaagcataa

SEQ ID NO: 67667 - RNA, 19 nt, synthetic construct
  misc_feature 1..19: note = siRNA antisense sequence
  source 1..19: mol_type = other RNA
ttatgctttgcaatttggg

SEQ ID NO: 67668 - RNA, 19 nt, synthetic construct
  misc_feature 1..19: note = siRNA sense sequence
  source 1..19: mol_type = other RNA
caaattgcaaagcataatg

SEQ ID NO: 67669 - RNA, 19 nt, synthetic construct
  misc_feature 1..19: note = siRNA antisense sequence
  source 1..19: mol_type = other RNA
cattatgctttgcaatttg

SEQ ID NO: 67670 - RNA, 19 nt, synthetic construct
  misc_feature 1..19: note = siRNA sense sequence
  source 1..19: mol_type = other RNA
tggctcaccatccaccacg

SEQ ID NO: 67671 - RNA, 19 nt, synthetic construct
  misc_feature 1..19: note = siRNA antisense sequence
  source 1..19: mol_type = other RNA
cgtggtggatggtgagcca

SEQ ID NO: 67672 - RNA, 19 nt, synthetic construct
  misc_feature 1..19: note = siRNA sense sequence
  source 1..19: mol_type = other RNA
ggctcaccatccaccacga

SEQ ID NO: 67673 - RNA, 19 nt, synthetic construct
  misc_feature 1..19: note = siRNA antisense sequence
  source 1..19: mol_type = other RNA
tcgtggtggatggtgagcc

SEQ ID NO: 67674 - RNA, 19 nt, synthetic construct
  misc_feature 1..19: note = siRNA sense sequence
  source 1..19: mol_type = other RNA
gctcaccatccaccacgat

SEQ ID NO: 67675 - RNA, 19 nt, synthetic construct
  misc_feature 1..19: note = siRNA antisense sequence
  source 1..19: mol_type = other RNA
atcgtggtggatggtgagc

SEQ ID NO: 67676 - RNA, 19 nt, synthetic construct
  misc_feature 1..19: note = siRNA sense sequence
  source 1..19: mol_type = other RNA
agtgtgttttcaagaggct

SEQ ID NO: 67677 - RNA, 19 nt, synthetic construct
  misc_feature 1..19: note = siRNA antisense sequence
  source 1..19: mol_type = other RNA
agcctcttgaaaacacact

SEQ ID NO: 67678 - RNA, 19 nt, synthetic construct
  misc_feature 1..19: note = siRNA sense sequence
  source 1..19: mol_type = other RNA
gtgtgttttcaagaggctt

SEQ ID NO: 67679 - RNA, 19 nt, synthetic construct
  misc_feature 1..19: note = siRNA antisense sequence
  source 1..19: mol_type = other RNA
aagcctcttgaaaacacac

SEQ ID NO: 67680 - RNA, 19 nt, synthetic construct
  misc_feature 1..19: note = siRNA sense sequence
  source 1..19: mol_type = other RNA
tgtgttttcaagaggcttt

SEQ ID NO: 67681 - RNA, 19 nt, synthetic construct
  misc_feature 1..19: note = siRNA antisense sequence
  source 1..19: mol_type = other RNA
aaagcctcttgaaaacaca

SEQ ID NO: 67682 - RNA, 19 nt, synthetic construct
  misc_feature 1..19: note = siRNA sense sequence
  source 1..19: mol_type = other RNA
atataagcagacgtcctga

SEQ ID NO: 67683 - RNA, 19 nt, synthetic construct
  misc_feature 1..19: note = siRNA antisense sequence
  source 1..19: mol_type = other RNA
tcaggacgtctgcttatat

SEQ ID NO: 67684 - RNA, 19 nt, synthetic construct
  misc_feature 1..19: note = siRNA sense sequence
  source 1..19: mol_type = other RNA
tataagcagacgtcctgat

SEQ ID NO: 67685 - RNA, 19 nt, synthetic construct
  misc_feature 1..19: note = siRNA antisense sequence
  source 1..19: mol_type = other RNA
atcaggacgtctgcttata

SEQ ID NO: 67686 - RNA, 19 nt, synthetic construct
  misc_feature 1..19: note = siRNA sense sequence
  source 1..19: mol_type = other RNA
ataagcagacgtcctgatg

SEQ ID NO: 67687 - RNA, 19 nt, synthetic construct
  misc_feature 1..19: note = siRNA antisense sequence
  source 1..19: mol_type = other RNA
catcaggacgtctgcttat

SEQ ID NO: 67688 - RNA, 19 nt, synthetic construct
  misc_feature 1..19: note = siRNA sense sequence
  source 1..19: mol_type = other RNA
taagcagacgtcctgatgc

SEQ ID NO: 67689 - RNA, 19 nt, synthetic construct
  misc_feature 1..19: note = siRNA antisense sequence
  source 1..19: mol_type = other RNA
gcatcaggacgtctgctta

SEQ ID NO: 67690 - RNA, 19 nt, synthetic construct
  misc_feature 1..19: note = siRNA sense sequence
  source 1..19: mol_type = other RNA
aagcagacgtcctgatgca

SEQ ID NO: 67691 - RNA, 19 nt, synthetic construct
  misc_feature 1..19: note = siRNA antisense sequence
  source 1..19: mol_type = other RNA
tgcatcaggacgtctgctt

SEQ ID NO: 67692 - RNA, 19 nt, synthetic construct
  misc_feature 1..19: note = siRNA sense sequence
  source 1..19: mol_type = other RNA
agcagacgtcctgatgcat

SEQ ID NO: 67693 - RNA, 19 nt, synthetic construct
  misc_feature 1..19: note = siRNA antisense sequence
  source 1..19: mol_type = other RNA
atgcatcaggacgtctgct

SEQ ID NO: 67694 - RNA, 19 nt, synthetic construct
  misc_feature 1..19: note = siRNA sense sequence
  source 1..19: mol_type = other RNA
gcagacgtcctgatgcatt

SEQ ID NO: 67695 - RNA, 19 nt, synthetic construct
  misc_feature 1..19: note = siRNA antisense sequence
  source 1..19: mol_type = other RNA
aatgcatcaggacgtctgc

SEQ ID NO: 67696 - RNA, 19 nt, synthetic construct
  misc_feature 1..19: note = siRNA sense sequence
  source 1..19: mol_type = other RNA
agacgtcctgatgcattta

SEQ ID NO: 67697 - RNA, 19 nt, synthetic construct
  misc_feature 1..19: note = siRNA antisense sequence
  source 1..19: mol_type = other RNA
taaatgcatcaggacgtct

SEQ ID NO: 67698 - RNA, 19 nt, synthetic construct
  misc_feature 1..19: note = siRNA sense sequence
  source 1..19: mol_type = other RNA
gacgtcctgatgcatttaa

SEQ ID NO: 67699 - RNA, 19 nt, synthetic construct
  misc_feature 1..19: note = siRNA antisense sequence
  source 1..19: mol_type = other RNA
ttaaatgcatcaggacgtc

SEQ ID NO: 67700 - RNA, 19 nt, synthetic construct
  misc_feature 1..19: note = siRNA sense sequence
  source 1..19: mol_type = other RNA
acgtcctgatgcatttaaa

SEQ ID NO: 67701 - RNA, 19 nt, synthetic construct
  misc_feature 1..19: note = siRNA antisense sequence
  source 1..19: mol_type = other RNA
tttaaatgcatcaggacgt

SEQ ID NO: 67702 - RNA, 19 nt, synthetic construct
  misc_feature 1..19: note = siRNA sense sequence
  source 1..19: mol_type = other RNA
cgtcctgatgcatttaaag

SEQ ID NO: 67703 - RNA, 19 nt, synthetic construct
  misc_feature 1..19: note = siRNA antisense sequence
  source 1..19: mol_type = other RNA
ctttaaatgcatcaggacg

SEQ ID NO: 67704 - RNA, 19 nt, synthetic construct
  misc_feature 1..19: note = siRNA sense sequence
  source 1..19: mol_type = other RNA
gtcctgatgcatttaaagt

SEQ ID NO: 67705 - RNA, 19 nt, synthetic construct
  misc_feature 1..19: note = siRNA antisense sequence
  source 1..19: mol_type = other RNA
actttaaatgcatcaggac

SEQ ID NO: 67706 - RNA, 19 nt, synthetic construct
  misc_feature 1..19: note = siRNA sense sequence
  source 1..19: mol_type = other RNA
cctgatgcatttaaagtta

SEQ ID NO: 67707 - RNA, 19 nt, synthetic construct
  misc_feature 1..19: note = siRNA antisense sequence
  source 1..19: mol_type = other RNA
taactttaaatgcatcagg

SEQ ID NO: 67708 - RNA, 19 nt, synthetic construct
  misc_feature 1..19: note = siRNA sense sequence
  source 1..19: mol_type = other RNA
aaatctccctaacgcccta

SEQ ID NO: 67709 - RNA, 19 nt, synthetic construct
  misc_feature 1..19: note = siRNA antisense sequence
  source 1..19: mol_type = other RNA
tagggcgttagggagattt

SEQ ID NO: 67710 - RNA, 19 nt, synthetic construct
  misc_feature 1..19: note = siRNA sense sequence
  source 1..19: mol_type = other RNA
aatctccctaacgccctag

SEQ ID NO: 67711 - RNA, 19 nt, synthetic construct
  misc_feature 1..19: note = siRNA antisense sequence
  source 1..19: mol_type = other RNA
ctagggcgttagggagatt

SEQ ID NO: 67712 - RNA, 19 nt, synthetic construct
  misc_feature 1..19: note = siRNA sense sequence
  source 1..19: mol_type = other RNA
atctccctaacgccctagc

SEQ ID NO: 67713 - RNA, 19 nt, synthetic construct
  misc_feature 1..19: note = siRNA antisense sequence
  source 1..19: mol_type = other RNA
gctagggcgttagggagat

SEQ ID NO: 67714 - RNA, 19 nt, synthetic construct
  misc_feature 1..19: note = siRNA sense sequence
  source 1..19: mol_type = other RNA
tctccctaacgccctagcc

SEQ ID NO: 67715 - RNA, 19 nt, synthetic construct
  misc_feature 1..19: note = siRNA antisense sequence
  source 1..19: mol_type = other RNA
ggctagggcgttagggaga

SEQ ID NO: 67716 - RNA, 19 nt, synthetic construct
  misc_feature 1..19: note = siRNA sense sequence
  source 1..19: mol_type = other RNA
ctccctaacgccctagcca

SEQ ID NO: 67717 - RNA, 19 nt, synthetic construct
  misc_feature 1..19: note = siRNA antisense sequence
  source 1..19: mol_type = other RNA
tggctagggcgttagggag

SEQ ID NO: 67718 - RNA, 19 nt, synthetic construct
  misc_feature 1..19: note = siRNA sense sequence
  source 1..19: mol_type = other RNA
ctaacgccctagccataat

SEQ ID NO: 67719 - RNA, 19 nt, synthetic construct
  misc_feature 1..19: note = siRNA antisense sequence
  source 1..19: mol_type = other RNA
attatggctagggcgttag

SEQ ID NO: 67720 - RNA, 19 nt, synthetic construct
  misc_feature 1..19: note = siRNA sense sequence
  source 1..19: mol_type = other RNA
taacgccctagccataata

SEQ ID NO: 67721 - RNA, 19 nt, synthetic construct
  misc_feature 1..19: note = siRNA antisense sequence
  source 1..19: mol_type = other RNA
tattatggctagggcgtta

SEQ ID NO: 67722 - RNA, 19 nt, synthetic construct
  misc_feature 1..19: note = siRNA sense sequence
  source 1..19: mol_type = other RNA
aacgccctagccataatat

SEQ ID NO: 67723 - RNA, 19 nt, synthetic construct
  misc_feature 1..19: note = siRNA antisense sequence
  source 1..19: mol_type = other RNA
atattatggctagggcgtt

SEQ ID NO: 67724 - RNA, 19 nt, synthetic construct
  misc_feature 1..19: note = siRNA sense sequence
  source 1..19: mol_type = other RNA
acgccctagccataatata

SEQ ID NO: 67725 - RNA, 19 nt, synthetic construct
  misc_feature 1..19: note = siRNA antisense sequence
  source 1..19: mol_type = other RNA
tatattatggctagggcgt

SEQ ID NO: 67726 - RNA, 19 nt, synthetic construct
  misc_feature 1..19: note = siRNA sense sequence
  source 1..19: mol_type = other RNA
cgccctagccataatatac

SEQ ID NO: 67727 - RNA, 19 nt, synthetic construct
  misc_feature 1..19: note = siRNA antisense sequence
  source 1..19: mol_type = other RNA
gtatattatggctagggcg

SEQ ID NO: 67728 - RNA, 19 nt, synthetic construct
  misc_feature 1..19: note = siRNA sense sequence
  source 1..19: mol_type = other RNA
gccctagccataatatacc

SEQ ID NO: 67729 - RNA, 19 nt, synthetic construct
  misc_feature 1..19: note = siRNA antisense sequence
  source 1..19: mol_type = other RNA
ggtatattatggctagggc

SEQ ID NO: 67730 - RNA, 19 nt, synthetic construct
  misc_feature 1..19: note = siRNA sense sequence
  source 1..19: mol_type = other RNA
ccctagccataatatacct

SEQ ID NO: 67731 - RNA, 19 nt, synthetic construct
  misc_feature 1..19: note = siRNA antisense sequence
  source 1..19: mol_type = other RNA
aggtatattatggctaggg

SEQ ID NO: 67732 - RNA, 19 nt, synthetic construct
  misc_feature 1..19: note = siRNA sense sequence
  source 1..19: mol_type = other RNA
cctagccataatatacctg

SEQ ID NO: 67733 - RNA, 19 nt, synthetic construct
  misc_feature 1..19: note = siRNA antisense sequence
  source 1..19: mol_type = other RNA
caggtatattatggctagg

SEQ ID NO: 67734 - RNA, 19 nt, synthetic construct
  misc_feature 1..19: note = siRNA sense sequence
  source 1..19: mol_type = other RNA
ctagccataatatacctgt

SEQ ID NO: 67735 - RNA, 19 nt, synthetic construct
  misc_feature 1..19: note = siRNA antisense sequence
  source 1..19: mol_type = other RNA
acaggtatattatggctag

SEQ ID NO: 67736 - RNA, 19 nt, synthetic construct
  misc_feature 1..19: note = siRNA sense sequence
  source 1..19: mol_type = other RNA
tagccataatatacctgtc

SEQ ID NO: 67737 - RNA, 19 nt, synthetic construct
  misc_feature 1..19: note = siRNA antisense sequence
  source 1..19: mol_type = other RNA
gacaggtatattatggcta

SEQ ID NO: 67738 - RNA, 19 nt, synthetic construct
  misc_feature 1..19: note = siRNA sense sequence
  source 1..19: mol_type = other RNA
agccataatatacctgtca

SEQ ID NO: 67739 - RNA, 19 nt, synthetic construct
  misc_feature 1..19: note = siRNA antisense sequence
  source 1..19: mol_type = other RNA
tgacaggtatattatggct

SEQ ID NO: 67740 - RNA, 19 nt, synthetic construct
  misc_feature 1..19: note = siRNA sense sequence
  source 1..19: mol_type = other RNA
gccataatatacctgtcag

SEQ ID NO: 67741 - RNA, 19 nt, synthetic construct
  misc_feature 1..19: note = siRNA antisense sequence
  source 1..19: mol_type = other RNA
ctgacaggtatattatggc

SEQ ID NO: 67742 - RNA, 19 nt, synthetic construct
  misc_feature 1..19: note = siRNA sense sequence
  source 1..19: mol_type = other RNA
ccataatatacctgtcaga

SEQ ID NO: 67743 - RNA, 19 nt, synthetic construct
  misc_feature 1..19: note = siRNA antisense sequence
  source 1..19: mol_type = other RNA
tctgacaggtatattatgg

SEQ ID NO: 67744 - RNA, 19 nt, synthetic construct
  misc_feature 1..19: note = siRNA sense sequence
  source 1..19: mol_type = other RNA
cataatatacctgtcagat

SEQ ID NO: 67745 - RNA, 19 nt, synthetic construct
  misc_feature 1..19: note = siRNA antisense sequence
  source 1..19: mol_type = other RNA
atctgacaggtatattatg

SEQ ID NO: 67746 - RNA, 19 nt, synthetic construct
  misc_feature 1..19: note = siRNA sense sequence
  source 1..19: mol_type = other RNA
taatatacctgtcagattc

SEQ ID NO: 67747 - RNA, 19 nt, synthetic construct
  misc_feature 1..19: note = siRNA antisense sequence
  source 1..19: mol_type = other RNA
gaatctgacaggtatatta

SEQ ID NO: 67748 - RNA, 19 nt, synthetic construct
  misc_feature 1..19: note = siRNA sense sequence
  source 1..19: mol_type = other RNA
aatatacctgtcagattcc

SEQ ID NO: 67749 - RNA, 19 nt, synthetic construct
  misc_feature 1..19: note = siRNA antisense sequence
  source 1..19: mol_type = other RNA
ggaatctgacaggtatatt

SEQ ID NO: 67750 - RNA, 19 nt, synthetic construct
  misc_feature 1..19: note = siRNA sense sequence
  source 1..19: mol_type = other RNA
atatacctgtcagattccc

SEQ ID NO: 67751 - RNA, 19 nt, synthetic construct
  misc_feature 1..19: note = siRNA antisense sequence
  source 1..19: mol_type = other RNA
gggaatctgacaggtatat

SEQ ID NO: 67752 - RNA, 19 nt, synthetic construct
  misc_feature 1..19: note = siRNA sense sequence
  source 1..19: mol_type = other RNA
tatacctgtcagattccct

SEQ ID NO: 67753 - RNA, 19 nt, synthetic construct
  misc_feature 1..19: note = siRNA antisense sequence
  source 1..19: mol_type = other RNA
agggaatctgacaggtata

SEQ ID NO: 67754 - RNA, 19 nt, synthetic construct
  misc_feature 1..19: note = siRNA sense sequence
  source 1..19: mol_type = other RNA
atacctgtcagattcccta

SEQ ID NO: 67755 - RNA, 19 nt, synthetic construct
  misc_feature 1..19: note = siRNA antisense sequence
  source 1..19: mol_type = other RNA
tagggaatctgacaggtat

SEQ ID NO: 67756 - RNA, 19 nt, synthetic construct
  misc_feature 1..19: note = siRNA sense sequence
  source 1..19: mol_type = other RNA
tacctgtcagattccctac

SEQ ID NO: 67757 - RNA, 19 nt, synthetic construct
  misc_feature 1..19: note = siRNA antisense sequence
  source 1..19: mol_type = other RNA
gtagggaatctgacaggta

SEQ ID NO: 67758 - RNA, 19 nt, synthetic construct
  misc_feature 1..19: note = siRNA sense sequence
  source 1..19: mol_type = other RNA
acctgtcagattccctacc

SEQ ID NO: 67759 - RNA, 19 nt, synthetic construct
  misc_feature 1..19: note = siRNA antisense sequence
  source 1..19: mol_type = other RNA
ggtagggaatctgacaggt

SEQ ID NO: 67760 - RNA, 19 nt, synthetic construct
  misc_feature 1..19: note = siRNA sense sequence
  source 1..19: mol_type = other RNA
cctgtcagattccctacca

SEQ ID NO: 67761 - RNA, 19 nt, synthetic construct
  misc_feature 1..19: note = siRNA antisense sequence
  source 1..19: mol_type = other RNA
tggtagggaatctgacagg

SEQ ID NO: 67762 - RNA, 19 nt, synthetic construct
  misc_feature 1..19: note = siRNA sense sequence
  source 1..19: mol_type = other RNA
ctgtcagattccctaccat

SEQ ID NO: 67763 - RNA, 19 nt, synthetic construct
  misc_feature 1..19: note = siRNA antisense sequence
  source 1..19: mol_type = other RNA
atggtagggaatctgacag

SEQ ID NO: 67764 - RNA, 19 nt, synthetic construct
  misc_feature 1..19: note = siRNA sense sequence
  source 1..19: mol_type = other RNA
tgtcagattccctaccatc

SEQ ID NO: 67765 - RNA, 19 nt, synthetic construct
  misc_feature 1..19: note = siRNA antisense sequence
  source 1..19: mol_type = other RNA
gatggtagggaatctgaca

SEQ ID NO: 67766 - RNA, 19 nt, synthetic construct
  misc_feature 1..19: note = siRNA sense sequence
  source 1..19: mol_type = other RNA
gattccctaccatctctaa

SEQ ID NO: 67767 - RNA, 19 nt, synthetic construct
  misc_feature 1..19: note = siRNA antisense sequence
  source 1..19: mol_type = other RNA
ttagagatggtagggaatc

SEQ ID NO: 67768 - RNA, 19 nt, synthetic construct
  misc_feature 1..19: note = siRNA sense sequence
  source 1..19: mol_type = other RNA
attccctaccatctctaat

SEQ ID NO: 67769 - RNA, 19 nt, synthetic construct
  misc_feature 1..19: note = siRNA antisense sequence
  source 1..19: mol_type = other RNA
attagagatggtagggaat

SEQ ID NO: 67770 - RNA, 19 nt, synthetic construct
  misc_feature 1..19: note = siRNA sense sequence
  source 1..19: mol_type = other RNA
ttccctaccatctctaatg

SEQ ID NO: 67771 - RNA, 19 nt, synthetic construct
  misc_feature 1..19: note = siRNA antisense sequence
  source 1..19: mol_type = other RNA
cattagagatggtagggaa

SEQ ID NO: 67772 - RNA, 19 nt, synthetic construct
  misc_feature 1..19: note = siRNA sense sequence
  source 1..19: mol_type = other RNA
tccctaccatctctaatga

SEQ ID NO: 67773 - RNA, 19 nt, synthetic construct
  misc_feature 1..19: note = siRNA antisense sequence
  source 1..19: mol_type = other RNA
tcattagagatggtaggga

SEQ ID NO: 67774 - RNA, 19 nt, synthetic construct
  misc_feature 1..19: note = siRNA sense sequence
  source 1..19: mol_type = other RNA
ccctaccatctctaatgac

SEQ ID NO: 67775 - RNA, 19 nt, synthetic construct
  misc_feature 1..19: note = siRNA antisense sequence
  source 1..19: mol_type = other RNA
gtcattagagatggtaggg

SEQ ID NO: 67776 - RNA, 19 nt, synthetic construct
  misc_feature 1..19: note = siRNA sense sequence
  source 1..19: mol_type = other RNA
cctaccatctctaatgacc

SEQ ID NO: 67777 - RNA, 19 nt, synthetic construct
  misc_feature 1..19: note = siRNA antisense sequence
  source 1..19: mol_type = other RNA
ggtcattagagatggtagg

SEQ ID NO: 67778 - RNA, 19 nt, synthetic construct
  misc_feature 1..19: note = siRNA sense sequence
  source 1..19: mol_type = other RNA
ccatctctaatgacctcaa

SEQ ID NO: 67779 - RNA, 19 nt, synthetic construct
  misc_feature 1..19: note = siRNA antisense sequence
  source 1..19: mol_type = other RNA
ttgaggtcattagagatgg

SEQ ID NO: 67780 - RNA, 19 nt, synthetic construct
  misc_feature 1..19: note = siRNA sense sequence
  source 1..19: mol_type = other RNA
catctctaatgacctcaac

SEQ ID NO: 67781 - RNA, 19 nt, synthetic construct
  misc_feature 1..19: note = siRNA antisense sequence
  source 1..19: mol_type = other RNA
gttgaggtcattagagatg

SEQ ID NO: 67782 - RNA, 19 nt, synthetic construct
  misc_feature 1..19: note = siRNA sense sequence
  source 1..19: mol_type = other RNA
atctctaatgacctcaact

SEQ ID NO: 67783 - RNA, 19 nt, synthetic construct
  misc_feature 1..19: note = siRNA antisense sequence
  source 1..19: mol_type = other RNA
agttgaggtcattagagat

SEQ ID NO: 67784 - RNA, 19 nt, synthetic construct
  misc_feature 1..19: note = siRNA sense sequence
  source 1..19: mol_type = other RNA
ctaatgacctcaacttatg

SEQ ID NO: 67785 - RNA, 19 nt, synthetic construct
  misc_feature 1..19: note = siRNA antisense sequence
  source 1..19: mol_type = other RNA
cataagttgaggtcattag

SEQ ID NO: 67786 - RNA, 19 nt, synthetic construct
  misc_feature 1..19: note = siRNA sense sequence
  source 1..19: mol_type = other RNA
taatgacctcaacttatgg

SEQ ID NO: 67787 - RNA, 19 nt, synthetic construct
  misc_feature 1..19: note = siRNA antisense sequence
  source 1..19: mol_type = other RNA
ccataagttgaggtcatta

SEQ ID NO: 67788 - RNA, 19 nt, synthetic construct
  misc_feature 1..19: note = siRNA sense sequence
  source 1..19: mol_type = other RNA
aatgacctcaacttatggt

SEQ ID NO: 67789 - RNA, 19 nt, synthetic construct
  misc_feature 1..19: note = siRNA antisense sequence
  source 1..19: mol_type = other RNA
accataagttgaggtcatt

SEQ ID NO: 67790 - RNA, 19 nt, synthetic construct
  misc_feature 1..19: note = siRNA sense sequence
  source 1..19: mol_type = other RNA
acctcaacttatggtcatc

SEQ ID NO: 67791 - RNA, 19 nt, synthetic construct
  misc_feature 1..19: note = siRNA antisense sequence
  source 1..19: mol_type = other RNA
gatgaccataagttgaggt

SEQ ID NO: 67792 - RNA, 19 nt, synthetic construct
  misc_feature 1..19: note = siRNA sense sequence
  source 1..19: mol_type = other RNA
aatttctctgccacatccc

SEQ ID NO: 67793 - RNA, 19 nt, synthetic construct
  misc_feature 1..19: note = siRNA antisense sequence
  source 1..19: mol_type = other RNA
gggatgtggcagagaaatt

SEQ ID NO: 67794 - RNA, 19 nt, synthetic construct
  misc_feature 1..19: note = siRNA sense sequence
  source 1..19: mol_type = other RNA
tctctgccacatccctgaa

SEQ ID NO: 67795 - RNA, 19 nt, synthetic construct
  misc_feature 1..19: note = siRNA antisense sequence
  source 1..19: mol_type = other RNA
ttcagggatgtggcagaga

SEQ ID NO: 67796 - RNA, 19 nt, synthetic construct
  misc_feature 1..19: note = siRNA sense sequence
  source 1..19: mol_type = other RNA
aaaagatgatggcaaagaa

SEQ ID NO: 67797 - RNA, 19 nt, synthetic construct
  misc_feature 1..19: note = siRNA antisense sequence
  source 1..19: mol_type = other RNA
ttctttgccatcatctttt

SEQ ID NO: 67798 - RNA, 19 nt, synthetic construct
  misc_feature 1..19: note = siRNA sense sequence
  source 1..19: mol_type = other RNA
gctagctaattgcagtttg

SEQ ID NO: 67799 - RNA, 19 nt, synthetic construct
  misc_feature 1..19: note = siRNA antisense sequence
  source 1..19: mol_type = other RNA
caaactgcaattagctagc

SEQ ID NO: 67800 - RNA, 19 nt, synthetic construct
  misc_feature 1..19: note = siRNA sense sequence
  source 1..19: mol_type = other RNA
ctagctaattgcagtttgt

SEQ ID NO: 67801 - RNA, 19 nt, synthetic construct
  misc_feature 1..19: note = siRNA antisense sequence
  source 1..19: mol_type = other RNA
acaaactgcaattagctag

SEQ ID NO: 67802 - RNA, 19 nt, synthetic construct
  misc_feature 1..19: note = siRNA sense sequence
  source 1..19: mol_type = other RNA
tagctaattgcagtttgtc

SEQ ID NO: 67803 - RNA, 19 nt, synthetic construct
  misc_feature 1..19: note = siRNA antisense sequence
  source 1..19: mol_type = other RNA
gacaaactgcaattagcta

SEQ ID NO: 67804 - RNA, 19 nt, synthetic construct
  misc_feature 1..19: note = siRNA sense sequence
  source 1..19: mol_type = other RNA
agctaattgcagtttgtct

SEQ ID NO: 67805 - RNA, 19 nt, synthetic construct
  misc_feature 1..19: note = siRNA antisense sequence
  source 1..19: mol_type = other RNA
agacaaactgcaattagct

SEQ ID NO: 67806 - RNA, 19 nt, synthetic construct
  misc_feature 1..19: note = siRNA sense sequence
  source 1..19: mol_type = other RNA
gctaattgcagtttgtctc

SEQ ID NO: 67807 - RNA, 19 nt, synthetic construct
  misc_feature 1..19: note = siRNA antisense sequence
  source 1..19: mol_type = other RNA
gagacaaactgcaattagc

SEQ ID NO: 67808 - RNA, 19 nt, synthetic construct
  misc_feature 1..19: note = siRNA sense sequence
  source 1..19: mol_type = other RNA
tttcccagaagcttttaat

SEQ ID NO: 67809 - RNA, 19 nt, synthetic construct
  misc_feature 1..19: note = siRNA antisense sequence
  source 1..19: mol_type = other RNA
attaaaagcttctgggaaa

SEQ ID NO: 67810 - RNA, 19 nt, synthetic construct
  misc_feature 1..19: note = siRNA sense sequence
  source 1..19: mol_type = other RNA
tcccagaagcttttaatta

SEQ ID NO: 67811 - RNA, 19 nt, synthetic construct
  misc_feature 1..19: note = siRNA antisense sequence
  source 1..19: mol_type = other RNA
taattaaaagcttctggga

SEQ ID NO: 67812 - RNA, 19 nt, synthetic construct
  misc_feature 1..19: note = siRNA sense sequence
  source 1..19: mol_type = other RNA
ccagaagcttttaattagt

SEQ ID NO: 67813 - RNA, 19 nt, synthetic construct
  misc_feature 1..19: note = siRNA antisense sequence
  source 1..19: mol_type = other RNA
actaattaaaagcttctgg

SEQ ID NO: 67814 - RNA, 19 nt, synthetic construct
  misc_feature 1..19: note = siRNA sense sequence
  source 1..19: mol_type = other RNA
gggtcatggtgtatttaac

SEQ ID NO: 67815 - RNA, 19 nt, synthetic construct
  misc_feature 1..19: note = siRNA antisense sequence
  source 1..19: mol_type = other RNA
gttaaatacaccatgaccc

SEQ ID NO: 67816 - RNA, 19 nt, synthetic construct
  misc_feature 1..19: note = siRNA sense sequence
  source 1..19: mol_type = other RNA
ggtcatggtgtatttaacc

SEQ ID NO: 67817 - RNA, 19 nt, synthetic construct
  misc_feature 1..19: note = siRNA antisense sequence
  source 1..19: mol_type = other RNA
ggttaaatacaccatgacc

SEQ ID NO: 67818 - RNA, 19 nt, synthetic construct
  misc_feature 1..19: note = siRNA sense sequence
  source 1..19: mol_type = other RNA
acgcctgtaatcccagcac

SEQ ID NO: 67819 - RNA, 19 nt, synthetic construct
  misc_feature 1..19: note = siRNA antisense sequence
  source 1..19: mol_type = other RNA
gtgctgggattacaggcgt

SEQ ID NO: 67820 - RNA, 19 nt, synthetic construct
  misc_feature 1..19: note = siRNA sense sequence
  source 1..19: mol_type = other RNA
cagcactttgggaggccga

SEQ ID NO: 67821 - RNA, 19 nt, synthetic construct
  misc_feature 1..19: note = siRNA antisense sequence
  source 1..19: mol_type = other RNA
tcggcctcccaaagtgctg

SEQ ID NO: 67822 - RNA, 19 nt, synthetic construct
  misc_feature 1..19: note = siRNA sense sequence
  source 1..19: mol_type = other RNA
agcactttgggaggccgag

SEQ ID NO: 67823 - RNA, 19 nt, synthetic construct
  misc_feature 1..19: note = siRNA antisense sequence
  source 1..19: mol_type = other RNA
ctcggcctcccaaagtgct

SEQ ID NO: 67824 - RNA, 19 nt, synthetic construct
  misc_feature 1..19: note = siRNA sense sequence
  source 1..19: mol_type = other RNA
actttgggaggccgaggca

SEQ ID NO: 67825 - RNA, 19 nt, synthetic construct
  misc_feature 1..19: note = siRNA antisense sequence
  source 1..19: mol_type = other RNA
tgcctcggcctcccaaagt

SEQ ID NO: 67826 - RNA, 19 nt, synthetic construct
  misc_feature 1..19: note = siRNA sense sequence
  source 1..19: mol_type = other RNA
gccgaggcaggcagatcat

SEQ ID NO: 67827 - RNA, 19 nt, synthetic construct
  misc_feature 1..19: note = siRNA antisense sequence
  source 1..19: mol_type = other RNA
atgatctgcctgcctcggc

SEQ ID NO: 67828 - RNA, 19 nt, synthetic construct
  misc_feature 1..19: note = siRNA sense sequence
  source 1..19: mol_type = other RNA
ccgaggcaggcagatcatg

SEQ ID NO: 67829 - RNA, 19 nt, synthetic construct
  misc_feature 1..19: note = siRNA antisense sequence
  source 1..19: mol_type = other RNA
catgatctgcctgcctcgg

SEQ ID NO: 67830 - RNA, 19 nt, synthetic construct
  misc_feature 1..19: note = siRNA sense sequence
  source 1..19: mol_type = other RNA
ggcaggcagatcatgaggt

SEQ ID NO: 67831 - RNA, 19 nt, synthetic construct
  misc_feature 1..19: note = siRNA antisense sequence
  source 1..19: mol_type = other RNA
acctcatgatctgcctgcc

SEQ ID NO: 67832 - RNA, 19 nt, synthetic construct
  misc_feature 1..19: note = siRNA sense sequence
  source 1..19: mol_type = other RNA
gcaggcagatcatgaggtc

SEQ ID NO: 67833 - RNA, 19 nt, synthetic construct
  misc_feature 1..19: note = siRNA antisense sequence
  source 1..19: mol_type = other RNA
gacctcatgatctgcctgc

SEQ ID NO: 67834 - RNA, 19 nt, synthetic construct
  misc_feature 1..19: note = siRNA sense sequence
  source 1..19: mol_type = other RNA
aaaattagctgggcatggt

SEQ ID NO: 67835 - RNA, 19 nt, synthetic construct
  misc_feature 1..19: note = siRNA antisense sequence
  source 1..19: mol_type = other RNA
accatgcccagctaatttt

SEQ ID NO: 67836 - RNA, 19 nt, synthetic construct
  misc_feature 1..19: note = siRNA sense sequence
  source 1..19: mol_type = other RNA
aaattagctgggcatggtg

SEQ ID NO: 67837 - RNA, 19 nt, synthetic construct
  misc_feature 1..19: note = siRNA antisense sequence
  source 1..19: mol_type = other RNA
caccatgcccagctaattt

SEQ ID NO: 67838 - RNA, 19 nt, synthetic construct
  misc_feature 1..19: note = siRNA sense sequence
  source 1..19: mol_type = other RNA
aattagctgggcatggtgg

SEQ ID NO: 67839 - RNA, 19 nt, synthetic construct
  misc_feature 1..19: note = siRNA antisense sequence
  source 1..19: mol_type = other RNA
ccaccatgcccagctaatt

SEQ ID NO: 67840 - RNA, 19 nt, synthetic construct
  misc_feature 1..19: note = siRNA sense sequence
  source 1..19: mol_type = other RNA
attagctgggcatggtggt

SEQ ID NO: 67841 - RNA, 19 nt, synthetic construct
  misc_feature 1..19: note = siRNA antisense sequence
  source 1..19: mol_type = other RNA
accaccatgcccagctaat

SEQ ID NO: 67842 - RNA, 19 nt, synthetic construct
  misc_feature 1..19: note = siRNA sense sequence
  source 1..19: mol_type = other RNA
ttagctgggcatggtggtg

SEQ ID NO: 67843 - RNA, 19 nt, synthetic construct
  misc_feature 1..19: note = siRNA antisense sequence
  source 1..19: mol_type = other RNA
caccaccatgcccagctaa

SEQ ID NO: 67844 - RNA, 19 nt, synthetic construct
  misc_feature 1..19: note = siRNA sense sequence
  source 1..19: mol_type = other RNA
tacccaggaggctgaggca

SEQ ID NO: 67845 - RNA, 19 nt, synthetic construct
  misc_feature 1..19: note = siRNA antisense sequence
  source 1..19: mol_type = other RNA
tgcctcagcctcctgggta

SEQ ID NO: 67846 - RNA, 19 nt, synthetic construct
  misc_feature 1..19: note = siRNA sense sequence
  source 1..19: mol_type = other RNA
ggaggttgcagtgagcgga

SEQ ID NO: 67847 - RNA, 19 nt, synthetic construct
  misc_feature 1..19: note = siRNA antisense sequence
  source 1..19: mol_type = other RNA
tccgctcactgcaacctcc

SEQ ID NO: 67848 - RNA, 19 nt, synthetic construct
  misc_feature 1..19: note = siRNA sense sequence
  source 1..19: mol_type = other RNA
gaggttgcagtgagcggag

SEQ ID NO: 67849 - RNA, 19 nt, synthetic construct
  misc_feature 1..19: note = siRNA antisense sequence
  source 1..19: mol_type = other RNA
ctccgctcactgcaacctc

SEQ ID NO: 67850 - RNA, 19 nt, synthetic construct
  misc_feature 1..19: note = siRNA sense sequence
  source 1..19: mol_type = other RNA
actgcactccagcctggtg

SEQ ID NO: 67851 - RNA, 19 nt, synthetic construct
  misc_feature 1..19: note = siRNA antisense sequence
  source 1..19: mol_type = other RNA
caccaggctggagtgcagt

SEQ ID NO: 67852 - RNA, 19 nt, synthetic construct
  misc_feature 1..19: note = siRNA sense sequence
  source 1..19: mol_type = other RNA
ctgcactccagcctggtga

SEQ ID NO: 67853 - RNA, 19 nt, synthetic construct
  misc_feature 1..19: note = siRNA antisense sequence
  source 1..19: mol_type = other RNA
tcaccaggctggagtgcag

SEQ ID NO: 67854 - RNA, 19 nt, synthetic construct
  misc_feature 1..19: note = siRNA sense sequence
  source 1..19: mol_type = other RNA
tgcactccagcctggtgac

SEQ ID NO: 67855 - RNA, 19 nt, synthetic construct
  misc_feature 1..19: note = siRNA antisense sequence
  source 1..19: mol_type = other RNA
gtcaccaggctggagtgca

SEQ ID NO: 67856 - RNA, 19 nt, synthetic construct
  misc_feature 1..19: note = siRNA sense sequence
  source 1..19: mol_type = other RNA
gcactccagcctggtgaca

SEQ ID NO: 67857 - RNA, 19 nt, synthetic construct
  misc_feature 1..19: note = siRNA antisense sequence
  source 1..19: mol_type = other RNA
tgtcaccaggctggagtgc

SEQ ID NO: 67858 - RNA, 19 nt, synthetic construct
  misc_feature 1..19: note = siRNA sense sequence
  source 1..19: mol_type = other RNA
agcctggtgacagagtgag

SEQ ID NO: 67859 - RNA, 19 nt, synthetic construct
  misc_feature 1..19: note = siRNA antisense sequence
  source 1..19: mol_type = other RNA
ctcactctgtcaccaggct

SEQ ID NO: 67860 - RNA, 19 nt, synthetic construct
  misc_feature 1..19: note = siRNA sense sequence
  source 1..19: mol_type = other RNA
attatattagttgtgtgcc

SEQ ID NO: 67861 - RNA, 19 nt, synthetic construct
  misc_feature 1..19: note = siRNA antisense sequence
  source 1..19: mol_type = other RNA
ggcacacaactaatataat

SEQ ID NO: 67862 - RNA, 19 nt, synthetic construct
  misc_feature 1..19: note = siRNA sense sequence
  source 1..19: mol_type = other RNA
ttatattagttgtgtgccc

SEQ ID NO: 67863 - RNA, 19 nt, synthetic construct
  misc_feature 1..19: note = siRNA antisense sequence
  source 1..19: mol_type = other RNA
gggcacacaactaatataa

SEQ ID NO: 67864 - RNA, 19 nt, synthetic construct
  misc_feature 1..19: note = siRNA sense sequence
  source 1..19: mol_type = other RNA
tatattagttgtgtgccca

SEQ ID NO: 67865 - RNA, 19 nt, synthetic construct
  misc_feature 1..19: note = siRNA antisense sequence
  source 1..19: mol_type = other RNA
tgggcacacaactaatata

SEQ ID NO: 67866 - RNA, 19 nt, synthetic construct
  misc_feature 1..19: note = siRNA sense sequence
  source 1..19: mol_type = other RNA
atattagttgtgtgcccag

SEQ ID NO: 67867 - RNA, 19 nt, synthetic construct
  misc_feature 1..19: note = siRNA antisense sequence
  source 1..19: mol_type = other RNA
ctgggcacacaactaatat

SEQ ID NO: 67868 - RNA, 19 nt, synthetic construct
  misc_feature 1..19: note = siRNA sense sequence
  source 1..19: mol_type = other RNA
tattagttgtgtgcccagc

SEQ ID NO: 67869 - RNA, 19 nt, synthetic construct
  misc_feature 1..19: note = siRNA antisense sequence
  source 1..19: mol_type = other RNA
gctgggcacacaactaata

SEQ ID NO: 67870 - RNA, 19 nt, synthetic construct
  misc_feature 1..19: note = siRNA sense sequence
  source 1..19: mol_type = other RNA
attagttgtgtgcccagca

SEQ ID NO: 67871 - RNA, 19 nt, synthetic construct
  misc_feature 1..19: note = siRNA antisense sequence
  source 1..19: mol_type = other RNA
tgctgggcacacaactaat

SEQ ID NO: 67872 - RNA, 19 nt, synthetic construct
  misc_feature 1..19: note = siRNA sense sequence
  source 1..19: mol_type = other RNA
ttagttgtgtgcccagcat

SEQ ID NO: 67873 - RNA, 19 nt, synthetic construct
  misc_feature 1..19: note = siRNA antisense sequence
  source 1..19: mol_type = other RNA
atgctgggcacacaactaa

SEQ ID NO: 67874 - RNA, 19 nt, synthetic construct
  misc_feature 1..19: note = siRNA sense sequence
  source 1..19: mol_type = other RNA
tagttgtgtgcccagcatt

SEQ ID NO: 67875 - RNA, 19 nt, synthetic construct
  misc_feature 1..19: note = siRNA antisense sequence
  source 1..19: mol_type = other RNA
aatgctgggcacacaacta

SEQ ID NO: 67876 - RNA, 19 nt, synthetic construct
  misc_feature 1..19: note = siRNA sense sequence
  source 1..19: mol_type = other RNA
agttgtgtgcccagcattg

SEQ ID NO: 67877 - RNA, 19 nt, synthetic construct
  misc_feature 1..19: note = siRNA antisense sequence
  source 1..19: mol_type = other RNA
caatgctgggcacacaact

SEQ ID NO: 67878 - RNA, 19 nt, synthetic construct
  misc_feature 1..19: note = siRNA sense sequence
  source 1..19: mol_type = other RNA
gttgtgtgcccagcattgc

SEQ ID NO: 67879 - RNA, 19 nt, synthetic construct
  misc_feature 1..19: note = siRNA antisense sequence
  source 1..19: mol_type = other RNA
gcaatgctgggcacacaac

SEQ ID NO: 67880 - RNA, 19 nt, synthetic construct
  misc_feature 1..19: note = siRNA sense sequence
  source 1..19: mol_type = other RNA
ttgtgtgcccagcattgcc

SEQ ID NO: 67881 - RNA, 19 nt, synthetic construct
  misc_feature 1..19: note = siRNA antisense sequence
  source 1..19: mol_type = other RNA
ggcaatgctgggcacacaa

SEQ ID NO: 67882 - RNA, 19 nt, synthetic construct
  misc_feature 1..19: note = siRNA sense sequence
  source 1..19: mol_type = other RNA
tgcccagcattgccaatat

SEQ ID NO: 67883 - RNA, 19 nt, synthetic construct
  misc_feature 1..19: note = siRNA antisense sequence
  source 1..19: mol_type = other RNA
atattggcaatgctgggca

SEQ ID NO: 67884 - RNA, 19 nt, synthetic construct
  misc_feature 1..19: note = siRNA sense sequence
  source 1..19: mol_type = other RNA
gcccagcattgccaatata

SEQ ID NO: 67885 - RNA, 19 nt, synthetic construct
  misc_feature 1..19: note = siRNA antisense sequence
  source 1..19: mol_type = other RNA
tatattggcaatgctgggc

SEQ ID NO: 67886 - RNA, 19 nt, synthetic construct
  misc_feature 1..19: note = siRNA sense sequence
  source 1..19: mol_type = other RNA
cccagcattgccaatatac

SEQ ID NO: 67887 - RNA, 19 nt, synthetic construct
  misc_feature 1..19: note = siRNA antisense sequence
  source 1..19: mol_type = other RNA
gtatattggcaatgctggg

SEQ ID NO: 67888 - RNA, 19 nt, synthetic construct
  misc_feature 1..19: note = siRNA sense sequence
  source 1..19: mol_type = other RNA
ccagcattgccaatatact

SEQ ID NO: 67889 - RNA, 19 nt, synthetic construct
  misc_feature 1..19: note = siRNA antisense sequence
  source 1..19: mol_type = other RNA
agtatattggcaatgctgg

SEQ ID NO: 67890 - RNA, 19 nt, synthetic construct
  misc_feature 1..19: note = siRNA sense sequence
  source 1..19: mol_type = other RNA
cagcattgccaatatacta

SEQ ID NO: 67891 - RNA, 19 nt, synthetic construct
  misc_feature 1..19: note = siRNA antisense sequence
  source 1..19: mol_type = other RNA
tagtatattggcaatgctg

SEQ ID NO: 67892 - RNA, 19 nt, synthetic construct
  misc_feature 1..19: note = siRNA sense sequence
  source 1..19: mol_type = other RNA
aggattaatatttgctacc

SEQ ID NO: 67893 - RNA, 19 nt, synthetic construct
  misc_feature 1..19: note = siRNA antisense sequence
  source 1..19: mol_type = other RNA
ggtagcaaatattaatcct

SEQ ID NO: 67894 - RNA, 19 nt, synthetic construct
  misc_feature 1..19: note = siRNA sense sequence
  source 1..19: mol_type = other RNA
cagattggattcttcaaaa

SEQ ID NO: 67895 - RNA, 19 nt, synthetic construct
  misc_feature 1..19: note = siRNA antisense sequence
  source 1..19: mol_type = other RNA
ttttgaagaatccaatctg

SEQ ID NO: 67896 - RNA, 19 nt, synthetic construct
  misc_feature 1..19: note = siRNA sense sequence
  source 1..19: mol_type = other RNA
agattggattcttcaaaag

SEQ ID NO: 67897 - RNA, 19 nt, synthetic construct
  misc_feature 1..19: note = siRNA antisense sequence
  source 1..19: mol_type = other RNA
cttttgaagaatccaatct

SEQ ID NO: 67898 - RNA, 19 nt, synthetic construct
  misc_feature 1..19: note = siRNA sense sequence
  source 1..19: mol_type = other RNA
caataatctatcctcaggt

SEQ ID NO: 67899 - RNA, 19 nt, synthetic construct
  misc_feature 1..19: note = siRNA antisense sequence
  source 1..19: mol_type = other RNA
acctgaggatagattattg

SEQ ID NO: 67900 - RNA, 19 nt, synthetic construct
  misc_feature 1..19: note = siRNA sense sequence
  source 1..19: mol_type = other RNA
tctatcctcaggtttgcct

SEQ ID NO: 67901 - RNA, 19 nt, synthetic construct
  misc_feature 1..19: note = siRNA antisense sequence
  source 1..19: mol_type = other RNA
aggcaaacctgaggataga

SEQ ID NO: 67902 - RNA, 19 nt, synthetic construct
  misc_feature 1..19: note = siRNA sense sequence
  source 1..19: mol_type = other RNA
gtcatgtaactatgtaatc

SEQ ID NO: 67903 - RNA, 19 nt, synthetic construct
  misc_feature 1..19: note = siRNA antisense sequence
  source 1..19: mol_type = other RNA
gattacatagttacatgac

SEQ ID NO: 67904 - RNA, 19 nt, synthetic construct
  misc_feature 1..19: note = siRNA sense sequence
  source 1..19: mol_type = other RNA
tcatgtaactatgtaatcc

SEQ ID NO: 67905 - RNA, 19 nt, synthetic construct
  misc_feature 1..19: note = siRNA antisense sequence
  source 1..19: mol_type = other RNA
ggattacatagttacatga

SEQ ID NO: 67906 - RNA, 19 nt, synthetic construct
  misc_feature 1..19: note = siRNA sense sequence
  source 1..19: mol_type = other RNA
catgtaactatgtaatcca

SEQ ID NO: 67907 - RNA, 19 nt, synthetic construct
  misc_feature 1..19: note = siRNA antisense sequence
  source 1..19: mol_type = other RNA
tggattacatagttacatg

SEQ ID NO: 67908 - RNA, 19 nt, synthetic construct
  misc_feature 1..19: note = siRNA sense sequence
  source 1..19: mol_type = other RNA
tgtaactatgtaatccatc

SEQ ID NO: 67909 - RNA, 19 nt, synthetic construct
  misc_feature 1..19: note = siRNA antisense sequence
  source 1..19: mol_type = other RNA
gatggattacatagttaca

SEQ ID NO: 67910 - RNA, 19 nt, synthetic construct
  misc_feature 1..19: note = siRNA sense sequence
  source 1..19: mol_type = other RNA
gtaactatgtaatccatca

SEQ ID NO: 67911 - RNA, 19 nt, synthetic construct
  misc_feature 1..19: note = siRNA antisense sequence
  source 1..19: mol_type = other RNA
tgatggattacatagttac

SEQ ID NO: 67912 - RNA, 19 nt, synthetic construct
  misc_feature 1..19: note = siRNA sense sequence
  source 1..19: mol_type = other RNA
tccatcagggattcattac

SEQ ID NO: 67913 - RNA, 19 nt, synthetic construct
  misc_feature 1..19: note = siRNA antisense sequence
  source 1..19: mol_type = other RNA
gtaatgaatccctgatgga

SEQ ID NO: 67914 - RNA, 19 nt, synthetic construct
  misc_feature 1..19: note = siRNA sense sequence
  source 1..19: mol_type = other RNA
ccatcagggattcattact

SEQ ID NO: 67915 - RNA, 19 nt, synthetic construct
  misc_feature 1..19: note = siRNA antisense sequence
  source 1..19: mol_type = other RNA
agtaatgaatccctgatgg

SEQ ID NO: 67916 - RNA, 19 nt, synthetic construct
  misc_feature 1..19: note = siRNA sense sequence
  source 1..19: mol_type = other RNA
catcagggattcattactt

SEQ ID NO: 67917 - RNA, 19 nt, synthetic construct
  misc_feature 1..19: note = siRNA antisense sequence
  source 1..19: mol_type = other RNA
aagtaatgaatccctgatg

SEQ ID NO: 67918 - RNA, 19 nt, synthetic construct
  misc_feature 1..19: note = siRNA sense sequence
  source 1..19: mol_type = other RNA
atcagggattcattacttg

SEQ ID NO: 67919 - RNA, 19 nt, synthetic construct
  misc_feature 1..19: note = siRNA antisense sequence
  source 1..19: mol_type = other RNA
caagtaatgaatccctgat

SEQ ID NO: 67920 - RNA, 19 nt, synthetic construct
  misc_feature 1..19: note = siRNA sense sequence
  source 1..19: mol_type = other RNA
tcagggattcattacttgg

SEQ ID NO: 67921 - RNA, 19 nt, synthetic construct
  misc_feature 1..19: note = siRNA antisense sequence
  source 1..19: mol_type = other RNA
ccaagtaatgaatccctga

SEQ ID NO: 67922 - RNA, 19 nt, synthetic construct
  misc_feature 1..19: note = siRNA sense sequence
  source 1..19: mol_type = other RNA
cagggattcattacttgga

SEQ ID NO: 67923 - RNA, 19 nt, synthetic construct
  misc_feature 1..19: note = siRNA antisense sequence
  source 1..19: mol_type = other RNA
tccaagtaatgaatccctg

SEQ ID NO: 67924 - RNA, 19 nt, synthetic construct
  misc_feature 1..19: note = siRNA sense sequence
  source 1..19: mol_type = other RNA
agggattcattacttggaa

SEQ ID NO: 67925 - RNA, 19 nt, synthetic construct
  misc_feature 1..19: note = siRNA antisense sequence
  source 1..19: mol_type = other RNA
ttccaagtaatgaatccct

SEQ ID NO: 67926 - RNA, 19 nt, synthetic construct
  misc_feature 1..19: note = siRNA sense sequence
  source 1..19: mol_type = other RNA
gacaggtcatgcattatcc

SEQ ID NO: 67927 - RNA, 19 nt, synthetic construct
  misc_feature 1..19: note = siRNA antisense sequence
  source 1..19: mol_type = other RNA
ggataatgcatgacctgtc

SEQ ID NO: 67928 - RNA, 19 nt, synthetic construct
  misc_feature 1..19: note = siRNA sense sequence
  source 1..19: mol_type = other RNA
atgtattaaatcaccatcc

SEQ ID NO: 67929 - RNA, 19 nt, synthetic construct
  misc_feature 1..19: note = siRNA antisense sequence
  source 1..19: mol_type = other RNA
ggatggtgatttaatacat

SEQ ID NO: 67930 - RNA, 19 nt, synthetic construct
  misc_feature 1..19: note = siRNA sense sequence
  source 1..19: mol_type = other RNA
tgtattaaatcaccatcca

SEQ ID NO: 67931 - RNA, 19 nt, synthetic construct
  misc_feature 1..19: note = siRNA antisense sequence
  source 1..19: mol_type = other RNA
tggatggtgatttaataca

SEQ ID NO: 67932 - RNA, 19 nt, synthetic construct
  misc_feature 1..19: note = siRNA sense sequence
  source 1..19: mol_type = other RNA
cccttgattcctgttggat

SEQ ID NO: 67933 - RNA, 19 nt, synthetic construct
  misc_feature 1..19: note = siRNA antisense sequence
  source 1..19: mol_type = other RNA
atccaacaggaatcaaggg

SEQ ID NO: 67934 - RNA, 19 nt, synthetic construct
  misc_feature 1..19: note = siRNA sense sequence
  source 1..19: mol_type = other RNA
ccttgattcctgttggata

SEQ ID NO: 67935 - RNA, 19 nt, synthetic construct
  misc_feature 1..19: note = siRNA antisense sequence
  source 1..19: mol_type = other RNA
tatccaacaggaatcaagg

SEQ ID NO: 67936 - RNA, 19 nt, synthetic construct
  misc_feature 1..19: note = siRNA sense sequence
  source 1..19: mol_type = other RNA
cttgattcctgttggatat

SEQ ID NO: 67937 - RNA, 19 nt, synthetic construct
  misc_feature 1..19: note = siRNA antisense sequence
  source 1..19: mol_type = other RNA
atatccaacaggaatcaag

SEQ ID NO: 67938 - RNA, 19 nt, synthetic construct
  misc_feature 1..19: note = siRNA sense sequence
  source 1..19: mol_type = other RNA
ctgttggatatccatgttc

SEQ ID NO: 67939 - RNA, 19 nt, synthetic construct
  misc_feature 1..19: note = siRNA antisense sequence
  source 1..19: mol_type = other RNA
gaacatggatatccaacag

SEQ ID NO: 67940 - RNA, 19 nt, synthetic construct
  misc_feature 1..19: note = siRNA sense sequence
  source 1..19: mol_type = other RNA
tgttggatatccatgttca

SEQ ID NO: 67941 - RNA, 19 nt, synthetic construct
  misc_feature 1..19: note = siRNA antisense sequence
  source 1..19: mol_type = other RNA
tgaacatggatatccaaca

SEQ ID NO: 67942 - RNA, 19 nt, synthetic construct
  misc_feature 1..19: note = siRNA sense sequence
  source 1..19: mol_type = other RNA
gttggatatccatgttcag

SEQ ID NO: 67943 - RNA, 19 nt, synthetic construct
  misc_feature 1..19: note = siRNA antisense sequence
  source 1..19: mol_type = other RNA
ctgaacatggatatccaac

SEQ ID NO: 67944 - RNA, 19 nt, synthetic construct
  misc_feature 1..19: note = siRNA sense sequence
  source 1..19: mol_type = other RNA
atgttcagcatgacagtca

SEQ ID NO: 67945 - RNA, 19 nt, synthetic construct
  misc_feature 1..19: note = siRNA antisense sequence
  source 1..19: mol_type = other RNA
tgactgtcatgctgaacat

SEQ ID NO: 67946 - RNA, 19 nt, synthetic construct
  misc_feature 1..19: note = siRNA sense sequence
  source 1..19: mol_type = other RNA
aaaagatcatttctcccta

SEQ ID NO: 67947 - RNA, 19 nt, synthetic construct
  misc_feature 1..19: note = siRNA antisense sequence
  source 1..19: mol_type = other RNA
tagggagaaatgatctttt

SEQ ID NO: 67948 - RNA, 19 nt, synthetic construct
  misc_feature 1..19: note = siRNA sense sequence
  source 1..19: mol_type = other RNA
aaagatcatttctccctat

SEQ ID NO: 67949 - RNA, 19 nt, synthetic construct
  misc_feature 1..19: note = siRNA antisense sequence
  source 1..19: mol_type = other RNA
atagggagaaatgatcttt

SEQ ID NO: 67950 - RNA, 19 nt, synthetic construct
  misc_feature 1..19: note = siRNA sense sequence
  source 1..19: mol_type = other RNA
agatcatttctccctattc

SEQ ID NO: 67951 - RNA, 19 nt, synthetic construct
  misc_feature 1..19: note = siRNA antisense sequence
  source 1..19: mol_type = other RNA
gaatagggagaaatgatct

SEQ ID NO: 67952 - RNA, 19 nt, synthetic construct
  misc_feature 1..19: note = siRNA sense sequence
  source 1..19: mol_type = other RNA
gatcatttctccctattca

SEQ ID NO: 67953 - RNA, 19 nt, synthetic construct
  misc_feature 1..19: note = siRNA antisense sequence
  source 1..19: mol_type = other RNA
tgaatagggagaaatgatc

SEQ ID NO: 67954 - RNA, 19 nt, synthetic construct
  misc_feature 1..19: note = siRNA sense sequence
  source 1..19: mol_type = other RNA
atcatttctccctattcaa

SEQ ID NO: 67955 - RNA, 19 nt, synthetic construct
  misc_feature 1..19: note = siRNA antisense sequence
  source 1..19: mol_type = other RNA
ttgaatagggagaaatgat

SEQ ID NO: 67956 - RNA, 19 nt, synthetic construct
  misc_feature 1..19: note = siRNA sense sequence
  source 1..19: mol_type = other RNA
catttagcatctttgtgtt

SEQ ID NO: 67957 - RNA, 19 nt, synthetic construct
  misc_feature 1..19: note = siRNA antisense sequence
  source 1..19: mol_type = other RNA
aacacaaagatgctaaatg

SEQ ID NO: 67958 - RNA, 19 nt, synthetic construct
  misc_feature 1..19: note = siRNA sense sequence
  source 1..19: mol_type = other RNA
atttagcatctttgtgttg

SEQ ID NO: 67959 - RNA, 19 nt, synthetic construct
  misc_feature 1..19: note = siRNA antisense sequence
  source 1..19: mol_type = other RNA
caacacaaagatgctaaat

SEQ ID NO: 67960 - RNA, 19 nt, synthetic construct
  misc_feature 1..19: note = siRNA sense sequence
  source 1..19: mol_type = other RNA
tttagcatctttgtgttgg

SEQ ID NO: 67961 - RNA, 19 nt, synthetic construct
  misc_feature 1..19: note = siRNA antisense sequence
  source 1..19: mol_type = other RNA
ccaacacaaagatgctaaa

SEQ ID NO: 67962 - RNA, 19 nt, synthetic construct
  misc_feature 1..19: note = siRNA sense sequence
  source 1..19: mol_type = other RNA
ttagcatctttgtgttggg

SEQ ID NO: 67963 - RNA, 19 nt, synthetic construct
  misc_feature 1..19: note = siRNA antisense sequence
  source 1..19: mol_type = other RNA
cccaacacaaagatgctaa

SEQ ID NO: 67964 - RNA, 19 nt, synthetic construct
  misc_feature 1..19: note = siRNA sense sequence
  source 1..19: mol_type = other RNA
tagcatctttgtgttgggt

SEQ ID NO: 67965 - RNA, 19 nt, synthetic construct
  misc_feature 1..19: note = siRNA antisense sequence
  source 1..19: mol_type = other RNA
acccaacacaaagatgcta

SEQ ID NO: 67966 - RNA, 19 nt, synthetic construct
  misc_feature 1..19: note = siRNA sense sequence
  source 1..19: mol_type = other RNA
agcatctttgtgttgggtt

SEQ ID NO: 67967 - RNA, 19 nt, synthetic construct
  misc_feature 1..19: note = siRNA antisense sequence
  source 1..19: mol_type = other RNA
aacccaacacaaagatgct

SEQ ID NO: 67968 - RNA, 19 nt, synthetic construct
  misc_feature 1..19: note = siRNA sense sequence
  source 1..19: mol_type = other RNA
gcatctttgtgttgggttc

SEQ ID NO: 67969 - RNA, 19 nt, synthetic construct
  misc_feature 1..19: note = siRNA antisense sequence
  source 1..19: mol_type = other RNA
gaacccaacacaaagatgc

SEQ ID NO: 67970 - RNA, 19 nt, synthetic construct
  misc_feature 1..19: note = siRNA sense sequence
  source 1..19: mol_type = other RNA
catctttgtgttgggttct

SEQ ID NO: 67971 - RNA, 19 nt, synthetic construct
  misc_feature 1..19: note = siRNA antisense sequence
  source 1..19: mol_type = other RNA
agaacccaacacaaagatg

SEQ ID NO: 67972 - RNA, 19 nt, synthetic construct
  misc_feature 1..19: note = siRNA sense sequence
  source 1..19: mol_type = other RNA
atctttgtgttgggttcta

SEQ ID NO: 67973 - RNA, 19 nt, synthetic construct
  misc_feature 1..19: note = siRNA antisense sequence
  source 1..19: mol_type = other RNA
tagaacccaacacaaagat

SEQ ID NO: 67974 - RNA, 19 nt, synthetic construct
  misc_feature 1..19: note = siRNA sense sequence
  source 1..19: mol_type = other RNA
tctttgtgttgggttctat

SEQ ID NO: 67975 - RNA, 19 nt, synthetic construct
  misc_feature 1..19: note = siRNA antisense sequence
  source 1..19: mol_type = other RNA
atagaacccaacacaaaga

SEQ ID NO: 67976 - RNA, 19 nt, synthetic construct
  misc_feature 1..19: note = siRNA sense sequence
  source 1..19: mol_type = other RNA
ctttgtgttgggttctata

SEQ ID NO: 67977 - RNA, 19 nt, synthetic construct
  misc_feature 1..19: note = siRNA antisense sequence
  source 1..19: mol_type = other RNA
tatagaacccaacacaaag

SEQ ID NO: 67978 - RNA, 19 nt, synthetic construct
  misc_feature 1..19: note = siRNA sense sequence
  source 1..19: mol_type = other RNA
tttgtgttgggttctatac

SEQ ID NO: 67979 - RNA, 19 nt, synthetic construct
  misc_feature 1..19: note = siRNA antisense sequence
  source 1..19: mol_type = other RNA
gtatagaacccaacacaaa

SEQ ID NO: 67980 - RNA, 19 nt, synthetic construct
  misc_feature 1..19: note = siRNA sense sequence
  source 1..19: mol_type = other RNA
ttgtgttgggttctatacc

SEQ ID NO: 67981 - RNA, 19 nt, synthetic construct
  misc_feature 1..19: note = siRNA antisense sequence
  source 1..19: mol_type = other RNA
ggtatagaacccaacacaa

SEQ ID NO: 67982 - RNA, 19 nt, synthetic construct
  misc_feature 1..19: note = siRNA sense sequence
  source 1..19: mol_type = other RNA
tgtgttgggttctatacct

SEQ ID NO: 67983 - RNA, 19 nt, synthetic construct
  misc_feature 1..19: note = siRNA antisense sequence
  source 1..19: mol_type = other RNA
aggtatagaacccaacaca

SEQ ID NO: 67984 - RNA, 19 nt, synthetic construct
  misc_feature 1..19: note = siRNA sense sequence
  source 1..19: mol_type = other RNA
gtgttgggttctataccta

SEQ ID NO: 67985 - RNA, 19 nt, synthetic construct
  misc_feature 1..19: note = siRNA antisense sequence
  source 1..19: mol_type = other RNA
taggtatagaacccaacac

SEQ ID NO: 67986 - RNA, 19 nt, synthetic construct
  misc_feature 1..19: note = siRNA sense sequence
  source 1..19: mol_type = other RNA
tgttgggttctatacctaa

SEQ ID NO: 67987 - RNA, 19 nt, synthetic construct
  misc_feature 1..19: note = siRNA antisense sequence
  source 1..19: mol_type = other RNA
ttaggtatagaacccaaca

SEQ ID NO: 67988 - RNA, 19 nt, synthetic construct
  misc_feature 1..19: note = siRNA sense sequence
  source 1..19: mol_type = other RNA
gttgggttctatacctaaa

SEQ ID NO: 67989 - RNA, 19 nt, synthetic construct
  misc_feature 1..19: note = siRNA antisense sequence
  source 1..19: mol_type = other RNA
tttaggtatagaacccaac

SEQ ID NO: 67990 - RNA, 19 nt, synthetic construct
  misc_feature 1..19: note = siRNA sense sequence
  source 1..19: mol_type = other RNA
ttgggttctatacctaaaa

SEQ ID NO: 67991 - RNA, 19 nt, synthetic construct
  misc_feature 1..19: note = siRNA antisense sequence
  source 1..19: mol_type = other RNA
ttttaggtatagaacccaa

SEQ ID NO: 67992 - RNA, 19 nt, synthetic construct
  misc_feature 1..19: note = siRNA sense sequence
  source 1..19: mol_type = other RNA
aaaatcaggatagactcgt

SEQ ID NO: 67993 - RNA, 19 nt, synthetic construct
  misc_feature 1..19: note = siRNA antisense sequence
  source 1..19: mol_type = other RNA
acgagtctatcctgatttt

SEQ ID NO: 67994 - RNA, 19 nt, synthetic construct
  misc_feature 1..19: note = siRNA sense sequence
  source 1..19: mol_type = other RNA
aaatcaggatagactcgtt

SEQ ID NO: 67995 - RNA, 19 nt, synthetic construct
  misc_feature 1..19: note = siRNA antisense sequence
  source 1..19: mol_type = other RNA
aacgagtctatcctgattt

SEQ ID NO: 67996 - RNA, 19 nt, synthetic construct
  misc_feature 1..19: note = siRNA sense sequence
  source 1..19: mol_type = other RNA
aatcaggatagactcgttt

SEQ ID NO: 67997 - RNA, 19 nt, synthetic construct
  misc_feature 1..19: note = siRNA antisense sequence
  source 1..19: mol_type = other RNA
aaacgagtctatcctgatt

SEQ ID NO: 67998 - RNA, 19 nt, synthetic construct
  misc_feature 1..19: note = siRNA sense sequence
  source 1..19: mol_type = other RNA
atcaggatagactcgttta

SEQ ID NO: 67999 - RNA, 19 nt, synthetic construct
  misc_feature 1..19: note = siRNA antisense sequence
  source 1..19: mol_type = other RNA
taaacgagtctatcctgat

SEQ ID NO: 68000 - RNA, 19 nt, synthetic construct
  misc_feature 1..19: note = siRNA sense sequence
  source 1..19: mol_type = other RNA
tcaggatagactcgtttaa

SEQ ID NO: 68001 - RNA, 19 nt, synthetic construct
  misc_feature 1..19: note = siRNA antisense sequence
  source 1..19: mol_type = other RNA
ttaaacgagtctatcctga

SEQ ID NO: 68002 - RNA, 19 nt, synthetic construct
  misc_feature 1..19: note = siRNA sense sequence
  source 1..19: mol_type = other RNA
caggatagactcgtttaaa

SEQ ID NO: 68003 - RNA, 19 nt, synthetic construct
  misc_feature 1..19: note = siRNA antisense sequence
  source 1..19: mol_type = other RNA
tttaaacgagtctatcctg

SEQ ID NO: 68004 - RNA, 19 nt, synthetic construct
  misc_feature 1..19: note = siRNA sense sequence
  source 1..19: mol_type = other RNA
aggatagactcgtttaaaa

SEQ ID NO: 68005 - RNA, 19 nt, synthetic construct
  misc_feature 1..19: note = siRNA antisense sequence
  source 1..19: mol_type = other RNA
ttttaaacgagtctatcct

SEQ ID NO: 68006 - RNA, 19 nt, synthetic construct
  misc_feature 1..19: note = siRNA sense sequence
  source 1..19: mol_type = other RNA
tgatattgagctctaaatg

SEQ ID NO: 68007 - RNA, 19 nt, synthetic construct
  misc_feature 1..19: note = siRNA antisense sequence
  source 1..19: mol_type = other RNA
catttagagctcaatatca

SEQ ID NO: 68008 - RNA, 19 nt, synthetic construct
  misc_feature 1..19: note = siRNA sense sequence
  source 1..19: mol_type = other RNA
gatattgagctctaaatgc

SEQ ID NO: 68009 - RNA, 19 nt, synthetic construct
  misc_feature 1..19: note = siRNA antisense sequence
  source 1..19: mol_type = other RNA
gcatttagagctcaatatc

SEQ ID NO: 68010 - RNA, 19 nt, synthetic construct
  misc_feature 1..19: note = siRNA sense sequence
  source 1..19: mol_type = other RNA
ttgagctctaaatgcaaaa

SEQ ID NO: 68011 - RNA, 19 nt, synthetic construct
  misc_feature 1..19: note = siRNA antisense sequence
  source 1..19: mol_type = other RNA
ttttgcatttagagctcaa

SEQ ID NO: 68012 - RNA, 19 nt, synthetic construct
  misc_feature 1..19: note = siRNA sense sequence
  source 1..19: mol_type = other RNA
gggacatgctaaaatggct

SEQ ID NO: 68013 - RNA, 19 nt, synthetic construct
  misc_feature 1..19: note = siRNA antisense sequence
  source 1..19: mol_type = other RNA
agccattttagcatgtccc

SEQ ID NO: 68014 - RNA, 19 nt, synthetic construct
  misc_feature 1..19: note = siRNA sense sequence
  source 1..19: mol_type = other RNA
ggacatgctaaaatggctt

SEQ ID NO: 68015 - RNA, 19 nt, synthetic construct
  misc_feature 1..19: note = siRNA antisense sequence
  source 1..19: mol_type = other RNA
aagccattttagcatgtcc

SEQ ID NO: 68016 - RNA, 19 nt, synthetic construct
  misc_feature 1..19: note = siRNA sense sequence
  source 1..19: mol_type = other RNA
gacatgctaaaatggcttc

SEQ ID NO: 68017 - RNA, 19 nt, synthetic construct
  misc_feature 1..19: note = siRNA antisense sequence
  source 1..19: mol_type = other RNA
gaagccattttagcatgtc

SEQ ID NO: 68018 - RNA, 19 nt, synthetic construct
  misc_feature 1..19: note = siRNA sense sequence
  source 1..19: mol_type = other RNA
acatgctaaaatggcttct

SEQ ID NO: 68019 - RNA, 19 nt, synthetic construct
  misc_feature 1..19: note = siRNA antisense sequence
  source 1..19: mol_type = other RNA
agaagccattttagcatgt

SEQ ID NO: 68020 - RNA, 19 nt, synthetic construct
  misc_feature 1..19: note = siRNA sense sequence
  source 1..19: mol_type = other RNA
catgctaaaatggcttctg

SEQ ID NO: 68021 - RNA, 19 nt, synthetic construct
  misc_feature 1..19: note = siRNA antisense sequence
  source 1..19: mol_type = other RNA
cagaagccattttagcatg

SEQ ID NO: 68022 - RNA, 19 nt, synthetic construct
  misc_feature 1..19: note = siRNA sense sequence
  source 1..19: mol_type = other RNA
aaattatctttgctgagca

SEQ ID NO: 68023 - RNA, 19 nt, synthetic construct
  misc_feature 1..19: note = siRNA antisense sequence
  source 1..19: mol_type = other RNA
tgctcagcaaagataattt

SEQ ID NO: 68024 - RNA, 19 nt, synthetic construct
  misc_feature 1..19: note = siRNA sense sequence
  source 1..19: mol_type = other RNA
aattatctttgctgagcag

SEQ ID NO: 68025 - RNA, 19 nt, synthetic construct
  misc_feature 1..19: note = siRNA antisense sequence
  source 1..19: mol_type = other RNA
ctgctcagcaaagataatt

SEQ ID NO: 68026 - RNA, 19 nt, synthetic construct
  misc_feature 1..19: note = siRNA sense sequence
  source 1..19: mol_type = other RNA
attatctttgctgagcagc

SEQ ID NO: 68027 - RNA, 19 nt, synthetic construct
  misc_feature 1..19: note = siRNA antisense sequence
  source 1..19: mol_type = other RNA
gctgctcagcaaagataat

SEQ ID NO: 68028 - RNA, 19 nt, synthetic construct
  misc_feature 1..19: note = siRNA sense sequence
  source 1..19: mol_type = other RNA
tgctgagcagcttttgaat

SEQ ID NO: 68029 - RNA, 19 nt, synthetic construct
  misc_feature 1..19: note = siRNA antisense sequence
  source 1..19: mol_type = other RNA
attcaaaagctgctcagca

SEQ ID NO: 68030 - RNA, 19 nt, synthetic construct
  misc_feature 1..19: note = siRNA sense sequence
  source 1..19: mol_type = other RNA
gcagcttttgaatgctaag

SEQ ID NO: 68031 - RNA, 19 nt, synthetic construct
  misc_feature 1..19: note = siRNA antisense sequence
  source 1..19: mol_type = other RNA
cttagcattcaaaagctgc

SEQ ID NO: 68032 - RNA, 19 nt, synthetic construct
  misc_feature 1..19: note = siRNA sense sequence
  source 1..19: mol_type = other RNA
gttccagtatgtgacccaa

SEQ ID NO: 68033 - RNA, 19 nt, synthetic construct
  misc_feature 1..19: note = siRNA antisense sequence
  source 1..19: mol_type = other RNA
ttgggtcacatactggaac

SEQ ID NO: 68034 - RNA, 19 nt, synthetic construct
  misc_feature 1..19: note = siRNA sense sequence
  source 1..19: mol_type = other RNA
tgtctcaactccttggtac

SEQ ID NO: 68035 - RNA, 19 nt, synthetic construct
  misc_feature 1..19: note = siRNA antisense sequence
  source 1..19: mol_type = other RNA
gtaccaaggagttgagaca

SEQ ID NO: 68036 - RNA, 19 nt, synthetic construct
  misc_feature 1..19: note = siRNA sense sequence
  source 1..19: mol_type = other RNA
gtctcaactccttggtaca

SEQ ID NO: 68037 - RNA, 19 nt, synthetic construct
  misc_feature 1..19: note = siRNA antisense sequence
  source 1..19: mol_type = other RNA
tgtaccaaggagttgagac

SEQ ID NO: 68038 - RNA, 19 nt, synthetic construct
  misc_feature 1..19: note = siRNA sense sequence
  source 1..19: mol_type = other RNA
tctcaactccttggtacag

SEQ ID NO: 68039 - RNA, 19 nt, synthetic construct
  misc_feature 1..19: note = siRNA antisense sequence
  source 1..19: mol_type = other RNA
ctgtaccaaggagttgaga

SEQ ID NO: 68040 - RNA, 19 nt, synthetic construct
  misc_feature 1..19: note = siRNA sense sequence
  source 1..19: mol_type = other RNA
tccttggtacagggttcat

SEQ ID NO: 68041 - RNA, 19 nt, synthetic construct
  misc_feature 1..19: note = siRNA antisense sequence
  source 1..19: mol_type = other RNA
atgaaccctgtaccaagga

SEQ ID NO: 68042 - RNA, 19 nt, synthetic construct
  misc_feature 1..19: note = siRNA sense sequence
  source 1..19: mol_type = other RNA
ccttggtacagggttcatt

SEQ ID NO: 68043 - RNA, 19 nt, synthetic construct
  misc_feature 1..19: note = siRNA antisense sequence
  source 1..19: mol_type = other RNA
aatgaaccctgtaccaagg

SEQ ID NO: 68044 - RNA, 19 nt, synthetic construct
  misc_feature 1..19: note = siRNA sense sequence
  source 1..19: mol_type = other RNA
cttggtacagggttcattc

SEQ ID NO: 68045 - RNA, 19 nt, synthetic construct
  misc_feature 1..19: note = siRNA antisense sequence
  source 1..19: mol_type = other RNA
gaatgaaccctgtaccaag

SEQ ID NO: 68046 - RNA, 19 nt, synthetic construct
  misc_feature 1..19: note = siRNA sense sequence
  source 1..19: mol_type = other RNA
ttggtacagggttcattca

SEQ ID NO: 68047 - RNA, 19 nt, synthetic construct
  misc_feature 1..19: note = siRNA antisense sequence
  source 1..19: mol_type = other RNA
tgaatgaaccctgtaccaa

SEQ ID NO: 68048 - RNA, 19 nt, synthetic construct
  misc_feature 1..19: note = siRNA sense sequence
  source 1..19: mol_type = other RNA
tggtacagggttcattcaa

SEQ ID NO: 68049 - RNA, 19 nt, synthetic construct
  misc_feature 1..19: note = siRNA antisense sequence
  source 1..19: mol_type = other RNA
ttgaatgaaccctgtacca

SEQ ID NO: 68050 - RNA, 19 nt, synthetic construct
  misc_feature 1..19: note = siRNA sense sequence
  source 1..19: mol_type = other RNA
ggtacagggttcattcaaa

SEQ ID NO: 68051 - RNA, 19 nt, synthetic construct
  misc_feature 1..19: note = siRNA antisense sequence
  source 1..19: mol_type = other RNA
tttgaatgaaccctgtacc

SEQ ID NO: 68052 - RNA, 19 nt, synthetic construct
  misc_feature 1..19: note = siRNA sense sequence
  source 1..19: mol_type = other RNA
ttaatttccaaccacactt

SEQ ID NO: 68053 - RNA, 19 nt, synthetic construct
  misc_feature 1..19: note = siRNA antisense sequence
  source 1..19: mol_type = other RNA
aagtgtggttggaaattaa

SEQ ID NO: 68054 - RNA, 19 nt, synthetic construct
  misc_feature 1..19: note = siRNA sense sequence
  source 1..19: mol_type = other RNA
taatttccaaccacacttc

SEQ ID NO: 68055 - RNA, 19 nt, synthetic construct
  misc_feature 1..19: note = siRNA antisense sequence
  source 1..19: mol_type = other RNA
gaagtgtggttggaaatta

SEQ ID NO: 68056 - RNA, 19 nt, synthetic construct
  misc_feature 1..19: note = siRNA sense sequence
  source 1..19: mol_type = other RNA
aatttccaaccacacttct

SEQ ID NO: 68057 - RNA, 19 nt, synthetic construct
  misc_feature 1..19: note = siRNA antisense sequence
  source 1..19: mol_type = other RNA
agaagtgtggttggaaatt

SEQ ID NO: 68058 - RNA, 19 nt, synthetic construct
  misc_feature 1..19: note = siRNA sense sequence
  source 1..19: mol_type = other RNA
atttccaaccacacttctt

SEQ ID NO: 68059 - RNA, 19 nt, synthetic construct
  misc_feature 1..19: note = siRNA antisense sequence
  source 1..19: mol_type = other RNA
aagaagtgtggttggaaat

SEQ ID NO: 68060 - RNA, 19 nt, synthetic construct
  misc_feature 1..19: note = siRNA sense sequence
  source 1..19: mol_type = other RNA
tttccaaccacacttctta

SEQ ID NO: 68061 - RNA, 19 nt, synthetic construct
  misc_feature 1..19: note = siRNA antisense sequence
  source 1..19: mol_type = other RNA
taagaagtgtggttggaaa

SEQ ID NO: 68062 - RNA, 19 nt, synthetic construct
  misc_feature 1..19: note = siRNA sense sequence
  source 1..19: mol_type = other RNA
ttccaaccacacttcttat

SEQ ID NO: 68063 - RNA, 19 nt, synthetic construct
  misc_feature 1..19: note = siRNA antisense sequence
  source 1..19: mol_type = other RNA
ataagaagtgtggttggaa

SEQ ID NO: 68064 - RNA, 19 nt, synthetic construct
  misc_feature 1..19: note = siRNA sense sequence
  source 1..19: mol_type = other RNA
tccaaccacacttcttatt

SEQ ID NO: 68065 - RNA, 19 nt, synthetic construct
  misc_feature 1..19: note = siRNA antisense sequence
  source 1..19: mol_type = other RNA
aataagaagtgtggttgga

SEQ ID NO: 68066 - RNA, 19 nt, synthetic construct
  misc_feature 1..19: note = siRNA sense sequence
  source 1..19: mol_type = other RNA
ccaaccacacttcttattt

SEQ ID NO: 68067 - RNA, 19 nt, synthetic construct
  misc_feature 1..19: note = siRNA antisense sequence
  source 1..19: mol_type = other RNA
aaataagaagtgtggttgg

SEQ ID NO: 68068 - RNA, 19 nt, synthetic construct
  misc_feature 1..19: note = siRNA sense sequence
  source 1..19: mol_type = other RNA
caaccacacttcttatttt

SEQ ID NO: 68069 - RNA, 19 nt, synthetic construct
  misc_feature 1..19: note = siRNA antisense sequence
  source 1..19: mol_type = other RNA
aaaataagaagtgtggttg

SEQ ID NO: 68070 - RNA, 19 nt, synthetic construct
  misc_feature 1..19: note = siRNA sense sequence
  source 1..19: mol_type = other RNA
tacattttaccaagaagtc

SEQ ID NO: 68071 - RNA, 19 nt, synthetic construct
  misc_feature 1..19: note = siRNA antisense sequence
  source 1..19: mol_type = other RNA
gacttcttggtaaaatgta

SEQ ID NO: 68072 - RNA, 19 nt, synthetic construct
  misc_feature 1..19: note = siRNA sense sequence
  source 1..19: mol_type = other RNA
tttaccaagaagtcactgc

SEQ ID NO: 68073 - RNA, 19 nt, synthetic construct
  misc_feature 1..19: note = siRNA antisense sequence
  source 1..19: mol_type = other RNA
gcagtgacttcttggtaaa

SEQ ID NO: 68074 - RNA, 19 nt, synthetic construct
  misc_feature 1..19: note = siRNA sense sequence
  source 1..19: mol_type = other RNA
ttaccaagaagtcactgct

SEQ ID NO: 68075 - RNA, 19 nt, synthetic construct
  misc_feature 1..19: note = siRNA antisense sequence
  source 1..19: mol_type = other RNA
agcagtgacttcttggtaa

SEQ ID NO: 68076 - RNA, 19 nt, synthetic construct
  misc_feature 1..19: note = siRNA sense sequence
  source 1..19: mol_type = other RNA
taccaagaagtcactgctt

SEQ ID NO: 68077 - RNA, 19 nt, synthetic construct
  misc_feature 1..19: note = siRNA antisense sequence
  source 1..19: mol_type = other RNA
aagcagtgacttcttggta

SEQ ID NO: 68078 - RNA, 19 nt, synthetic construct
  misc_feature 1..19: note = siRNA sense sequence
  source 1..19: mol_type = other RNA
accaagaagtcactgcttt

SEQ ID NO: 68079 - RNA, 19 nt, synthetic construct
  misc_feature 1..19: note = siRNA antisense sequence
  source 1..19: mol_type = other RNA
aaagcagtgacttcttggt

SEQ ID NO: 68080 - RNA, 19 nt, synthetic construct
  misc_feature 1..19: note = siRNA sense sequence
  source 1..19: mol_type = other RNA
ttttaggtgtgttgcatca

SEQ ID NO: 68081 - RNA, 19 nt, synthetic construct
  misc_feature 1..19: note = siRNA antisense sequence
  source 1..19: mol_type = other RNA
tgatgcaacacacctaaaa

SEQ ID NO: 68082 - RNA, 19 nt, synthetic construct
  misc_feature 1..19: note = siRNA sense sequence
  source 1..19: mol_type = other RNA
tttaggtgtgttgcatcaa

SEQ ID NO: 68083 - RNA, 19 nt, synthetic construct
  misc_feature 1..19: note = siRNA antisense sequence
  source 1..19: mol_type = other RNA
ttgatgcaacacacctaaa

SEQ ID NO: 68084 - RNA, 19 nt, synthetic construct
  misc_feature 1..19: note = siRNA sense sequence
  source 1..19: mol_type = other RNA
ttaggtgtgttgcatcaat

SEQ ID NO: 68085 - RNA, 19 nt, synthetic construct
  misc_feature 1..19: note = siRNA antisense sequence
  source 1..19: mol_type = other RNA
attgatgcaacacacctaa

SEQ ID NO: 68086 - RNA, 19 nt, synthetic construct
  misc_feature 1..19: note = siRNA sense sequence
  source 1..19: mol_type = other RNA
taggtgtgttgcatcaata

SEQ ID NO: 68087 - RNA, 19 nt, synthetic construct
  misc_feature 1..19: note = siRNA antisense sequence
  source 1..19: mol_type = other RNA
tattgatgcaacacaccta

SEQ ID NO: 68088 - RNA, 19 nt, synthetic construct
  misc_feature 1..19: note = siRNA sense sequence
  source 1..19: mol_type = other RNA
aggtgtgttgcatcaatat

SEQ ID NO: 68089 - RNA, 19 nt, synthetic construct
  misc_feature 1..19: note = siRNA antisense sequence
  source 1..19: mol_type = other RNA
atattgatgcaacacacct

SEQ ID NO: 68090 - RNA, 19 nt, synthetic construct
  misc_feature 1..19: note = siRNA sense sequence
  source 1..19: mol_type = other RNA
ggtgtgttgcatcaatatt

SEQ ID NO: 68091 - RNA, 19 nt, synthetic construct
  misc_feature 1..19: note = siRNA antisense sequence
  source 1..19: mol_type = other RNA
aatattgatgcaacacacc

SEQ ID NO: 68092 - RNA, 19 nt, synthetic construct
  misc_feature 1..19: note = siRNA sense sequence
  source 1..19: mol_type = other RNA
gtgtgttgcatcaatattt

SEQ ID NO: 68093 - RNA, 19 nt, synthetic construct
  misc_feature 1..19: note = siRNA antisense sequence
  source 1..19: mol_type = other RNA
aaatattgatgcaacacac

SEQ ID NO: 68094 - RNA, 19 nt, synthetic construct
  misc_feature 1..19: note = siRNA sense sequence
  source 1..19: mol_type = other RNA
aagatatcacacctttgta

SEQ ID NO: 68095 - RNA, 19 nt, synthetic construct
  misc_feature 1..19: note = siRNA antisense sequence
  source 1..19: mol_type = other RNA
tacaaaggtgtgatatctt

SEQ ID NO: 68096 - RNA, 19 nt, synthetic construct
  misc_feature 1..19: note = siRNA sense sequence
  source 1..19: mol_type = other RNA
acacctttgtatgtgcttc

SEQ ID NO: 68097 - RNA, 19 nt, synthetic construct
  misc_feature 1..19: note = siRNA antisense sequence
  source 1..19: mol_type = other RNA
gaagcacatacaaaggtgt

SEQ ID NO: 68098 - RNA, 19 nt, synthetic construct
  misc_feature 1..19: note = siRNA sense sequence
  source 1..19: mol_type = other RNA
cacctttgtatgtgcttct

SEQ ID NO: 68099 - RNA, 19 nt, synthetic construct
  misc_feature 1..19: note = siRNA antisense sequence
  source 1..19: mol_type = other RNA
agaagcacatacaaaggtg

SEQ ID NO: 68100 - RNA, 19 nt, synthetic construct
  misc_feature 1..19: note = siRNA sense sequence
  source 1..19: mol_type = other RNA
acctttgtatgtgcttctt

SEQ ID NO: 68101 - RNA, 19 nt, synthetic construct
  misc_feature 1..19: note = siRNA antisense sequence
  source 1..19: mol_type = other RNA
aagaagcacatacaaaggt

SEQ ID NO: 68102 - RNA, 19 nt, synthetic construct
  misc_feature 1..19: note = siRNA sense sequence
  source 1..19: mol_type = other RNA
tgtgcttctttgttcttga

SEQ ID NO: 68103 - RNA, 19 nt, synthetic construct
  misc_feature 1..19: note = siRNA antisense sequence
  source 1..19: mol_type = other RNA
tcaagaacaaagaagcaca

SEQ ID NO: 68104 - RNA, 19 nt, synthetic construct
  misc_feature 1..19: note = siRNA sense sequence
  source 1..19: mol_type = other RNA
gtgcttctttgttcttgaa

SEQ ID NO: 68105 - RNA, 19 nt, synthetic construct
  misc_feature 1..19: note = siRNA antisense sequence
  source 1..19: mol_type = other RNA
ttcaagaacaaagaagcac

SEQ ID NO: 68106 - RNA, 19 nt, synthetic construct
  misc_feature 1..19: note = siRNA sense sequence
  source 1..19: mol_type = other RNA
ttctttgttcttgaagtag

SEQ ID NO: 68107 - RNA, 19 nt, synthetic construct
  misc_feature 1..19: note = siRNA antisense sequence
  source 1..19: mol_type = other RNA
ctacttcaagaacaaagaa

SEQ ID NO: 68108 - RNA, 19 nt, synthetic construct
  misc_feature 1..19: note = siRNA sense sequence
  source 1..19: mol_type = other RNA
tctttgttcttgaagtagt

SEQ ID NO: 68109 - RNA, 19 nt, synthetic construct
  misc_feature 1..19: note = siRNA antisense sequence
  source 1..19: mol_type = other RNA
actacttcaagaacaaaga

SEQ ID NO: 68110 - RNA, 19 nt, synthetic construct
  misc_feature 1..19: note = siRNA sense sequence
  source 1..19: mol_type = other RNA
ctttgttcttgaagtagtc

SEQ ID NO: 68111 - RNA, 19 nt, synthetic construct
  misc_feature 1..19: note = siRNA antisense sequence
  source 1..19: mol_type = other RNA
gactacttcaagaacaaag

SEQ ID NO: 68112 - RNA, 19 nt, synthetic construct
  misc_feature 1..19: note = siRNA sense sequence
  source 1..19: mol_type = other RNA
ttgttcttgaagtagtcat

SEQ ID NO: 68113 - RNA, 19 nt, synthetic construct
  misc_feature 1..19: note = siRNA antisense sequence
  source 1..19: mol_type = other RNA
atgactacttcaagaacaa

SEQ ID NO: 68114 - RNA, 19 nt, synthetic construct
  misc_feature 1..19: note = siRNA sense sequence
  source 1..19: mol_type = other RNA
tgttcttgaagtagtcatt

SEQ ID NO: 68115 - RNA, 19 nt, synthetic construct
  misc_feature 1..19: note = siRNA antisense sequence
  source 1..19: mol_type = other RNA
aatgactacttcaagaaca

SEQ ID NO: 68116 - RNA, 19 nt, synthetic construct
  misc_feature 1..19: note = siRNA sense sequence
  source 1..19: mol_type = other RNA
gttcttgaagtagtcatta

SEQ ID NO: 68117 - RNA, 19 nt, synthetic construct
  misc_feature 1..19: note = siRNA antisense sequence
  source 1..19: mol_type = other RNA
taatgactacttcaagaac

SEQ ID NO: 68118 - RNA, 19 nt, synthetic construct
  misc_feature 1..19: note = siRNA sense sequence
  source 1..19: mol_type = other RNA
tcttgaagtagtcattatg

SEQ ID NO: 68119 - RNA, 19 nt, synthetic construct
  misc_feature 1..19: note = siRNA antisense sequence
  source 1..19: mol_type = other RNA
cataatgactacttcaaga

SEQ ID NO: 68120 - RNA, 19 nt, synthetic construct
  misc_feature 1..19: note = siRNA sense sequence
  source 1..19: mol_type = other RNA
ttgaagtagtcattatggt

SEQ ID NO: 68121 - RNA, 19 nt, synthetic construct
  misc_feature 1..19: note = siRNA antisense sequence
  source 1..19: mol_type = other RNA
accataatgactacttcaa

SEQ ID NO: 68122 - RNA, 19 nt, synthetic construct
  misc_feature 1..19: note = siRNA sense sequence
  source 1..19: mol_type = other RNA
tgaagtagtcattatggtt

SEQ ID NO: 68123 - RNA, 19 nt, synthetic construct
  misc_feature 1..19: note = siRNA antisense sequence
  source 1..19: mol_type = other RNA
aaccataatgactacttca

SEQ ID NO: 68124 - RNA, 19 nt, synthetic construct
  misc_feature 1..19: note = siRNA sense sequence
  source 1..19: mol_type = other RNA
gaagtagtcattatggttc

SEQ ID NO: 68125 - RNA, 19 nt, synthetic construct
  misc_feature 1..19: note = siRNA antisense sequence
  source 1..19: mol_type = other RNA
gaaccataatgactacttc

SEQ ID NO: 68126 - RNA, 19 nt, synthetic construct
  misc_feature 1..19: note = siRNA sense sequence
  source 1..19: mol_type = other RNA
aagtagtcattatggttca

SEQ ID NO: 68127 - RNA, 19 nt, synthetic construct
  misc_feature 1..19: note = siRNA antisense sequence
  source 1..19: mol_type = other RNA
tgaaccataatgactactt

SEQ ID NO: 68128 - RNA, 19 nt, synthetic construct
  misc_feature 1..19: note = siRNA sense sequence
  source 1..19: mol_type = other RNA
agtagtcattatggttcat

SEQ ID NO: 68129 - RNA, 19 nt, synthetic construct
  misc_feature 1..19: note = siRNA antisense sequence
  source 1..19: mol_type = other RNA
atgaaccataatgactact

SEQ ID NO: 68130 - RNA, 19 nt, synthetic construct
  misc_feature 1..19: note = siRNA sense sequence
  source 1..19: mol_type = other RNA
gtagtcattatggttcatt

SEQ ID NO: 68131 - RNA, 19 nt, synthetic construct
  misc_feature 1..19: note = siRNA antisense sequence
  source 1..19: mol_type = other RNA
aatgaaccataatgactac

SEQ ID NO: 68132 - RNA, 19 nt, synthetic construct
  misc_feature 1..19: note = siRNA sense sequence
  source 1..19: mol_type = other RNA
tagtcattatggttcattg

SEQ ID NO: 68133 - RNA, 19 nt, synthetic construct
  misc_feature 1..19: note = siRNA antisense sequence
  source 1..19: mol_type = other RNA
caatgaaccataatgacta

SEQ ID NO: 68134 - RNA, 19 nt, synthetic construct
  misc_feature 1..19: note = siRNA sense sequence
  source 1..19: mol_type = other RNA
agtcattatggttcattgg

SEQ ID NO: 68135 - RNA, 19 nt, synthetic construct
  misc_feature 1..19: note = siRNA antisense sequence
  source 1..19: mol_type = other RNA
ccaatgaaccataatgact

SEQ ID NO: 68136 - RNA, 19 nt, synthetic construct
  misc_feature 1..19: note = siRNA sense sequence
  source 1..19: mol_type = other RNA
gtcattatggttcattgga

SEQ ID NO: 68137 - RNA, 19 nt, synthetic construct
  misc_feature 1..19: note = siRNA antisense sequence
  source 1..19: mol_type = other RNA
tccaatgaaccataatgac

SEQ ID NO: 68138 - RNA, 19 nt, synthetic construct
  misc_feature 1..19: note = siRNA sense sequence
  source 1..19: mol_type = other RNA
tcattatggttcattggaa

SEQ ID NO: 68139 - RNA, 19 nt, synthetic construct
  misc_feature 1..19: note = siRNA antisense sequence
  source 1..19: mol_type = other RNA
ttccaatgaaccataatga

SEQ ID NO: 68140 - RNA, 19 nt, synthetic construct
  misc_feature 1..19: note = siRNA sense sequence
  source 1..19: mol_type = other RNA
cattatggttcattggaat

SEQ ID NO: 68141 - RNA, 19 nt, synthetic construct
  misc_feature 1..19: note = siRNA antisense sequence
  source 1..19: mol_type = other RNA
attccaatgaaccataatg

SEQ ID NO: 68142 - RNA, 19 nt, synthetic construct
  misc_feature 1..19: note = siRNA sense sequence
  source 1..19: mol_type = other RNA
attatggttcattggaatc

SEQ ID NO: 68143 - RNA, 19 nt, synthetic construct
  misc_feature 1..19: note = siRNA antisense sequence
  source 1..19: mol_type = other RNA
gattccaatgaaccataat

SEQ ID NO: 68144 - RNA, 19 nt, synthetic construct
  misc_feature 1..19: note = siRNA sense sequence
  source 1..19: mol_type = other RNA
ttatggttcattggaatct

SEQ ID NO: 68145 - RNA, 19 nt, synthetic construct
  misc_feature 1..19: note = siRNA antisense sequence
  source 1..19: mol_type = other RNA
agattccaatgaaccataa

SEQ ID NO: 68146 - RNA, 19 nt, synthetic construct
  misc_feature 1..19: note = siRNA sense sequence
  source 1..19: mol_type = other RNA
tatggttcattggaatcta

SEQ ID NO: 68147 - RNA, 19 nt, synthetic construct
  misc_feature 1..19: note = siRNA antisense sequence
  source 1..19: mol_type = other RNA
tagattccaatgaaccata

SEQ ID NO: 68148 - RNA, 19 nt, synthetic construct
  misc_feature 1..19: note = siRNA sense sequence
  source 1..19: mol_type = other RNA
tggaatctactgtagcata

SEQ ID NO: 68149 - RNA, 19 nt, synthetic construct
  misc_feature 1..19: note = siRNA antisense sequence
  source 1..19: mol_type = other RNA
tatgctacagtagattcca

SEQ ID NO: 68150 - RNA, 19 nt, synthetic construct
  misc_feature 1..19: note = siRNA sense sequence
  source 1..19: mol_type = other RNA
ggaatctactgtagcataa

SEQ ID NO: 68151 - RNA, 19 nt, synthetic construct
  misc_feature 1..19: note = siRNA antisense sequence
  source 1..19: mol_type = other RNA
ttatgctacagtagattcc

SEQ ID NO: 68152 - RNA, 19 nt, synthetic construct
  misc_feature 1..19: note = siRNA sense sequence
  source 1..19: mol_type = other RNA
gaatctactgtagcataag

SEQ ID NO: 68153 - RNA, 19 nt, synthetic construct
  misc_feature 1..19: note = siRNA antisense sequence
  source 1..19: mol_type = other RNA
cttatgctacagtagattc

SEQ ID NO: 68154 - RNA, 19 nt, synthetic construct
  misc_feature 1..19: note = siRNA sense sequence
  source 1..19: mol_type = other RNA
aatctactgtagcataagc

SEQ ID NO: 68155 - RNA, 19 nt, synthetic construct
  misc_feature 1..19: note = siRNA antisense sequence
  source 1..19: mol_type = other RNA
gcttatgctacagtagatt

SEQ ID NO: 68156 - RNA, 19 nt, synthetic construct
  misc_feature 1..19: note = siRNA sense sequence
  source 1..19: mol_type = other RNA
tgtagcataagctcctagg

SEQ ID NO: 68157 - RNA, 19 nt, synthetic construct
  misc_feature 1..19: note = siRNA antisense sequence
  source 1..19: mol_type = other RNA
cctaggagcttatgctaca

SEQ ID NO: 68158 - RNA, 19 nt, synthetic construct
  misc_feature 1..19: note = siRNA sense sequence
  source 1..19: mol_type = other RNA
gtagcataagctcctaggt

SEQ ID NO: 68159 - RNA, 19 nt, synthetic construct
  misc_feature 1..19: note = siRNA antisense sequence
  source 1..19: mol_type = other RNA
acctaggagcttatgctac

SEQ ID NO: 68160 - RNA, 19 nt, synthetic construct
  misc_feature 1..19: note = siRNA sense sequence
  source 1..19: mol_type = other RNA
tagcataagctcctaggtt

SEQ ID NO: 68161 - RNA, 19 nt, synthetic construct
  misc_feature 1..19: note = siRNA antisense sequence
  source 1..19: mol_type = other RNA
aacctaggagcttatgcta

SEQ ID NO: 68162 - RNA, 19 nt, synthetic construct
  misc_feature 1..19: note = siRNA sense sequence
  source 1..19: mol_type = other RNA
agcataagctcctaggttg

SEQ ID NO: 68163 - RNA, 19 nt, synthetic construct
  misc_feature 1..19: note = siRNA antisense sequence
  source 1..19: mol_type = other RNA
caacctaggagcttatgct

SEQ ID NO: 68164 - RNA, 19 nt, synthetic construct
  misc_feature 1..19: note = siRNA sense sequence
  source 1..19: mol_type = other RNA
gcataagctcctaggttgc

SEQ ID NO: 68165 - RNA, 19 nt, synthetic construct
  misc_feature 1..19: note = siRNA antisense sequence
  source 1..19: mol_type = other RNA
gcaacctaggagcttatgc

SEQ ID NO: 68166 - RNA, 19 nt, synthetic construct
  misc_feature 1..19: note = siRNA sense sequence
  source 1..19: mol_type = other RNA
cataagctcctaggttgct

SEQ ID NO: 68167 - RNA, 19 nt, synthetic construct
  misc_feature 1..19: note = siRNA antisense sequence
  source 1..19: mol_type = other RNA
agcaacctaggagcttatg

SEQ ID NO: 68168 - RNA, 19 nt, synthetic construct
  misc_feature 1..19: note = siRNA sense sequence
  source 1..19: mol_type = other RNA
ataagctcctaggttgctc

SEQ ID NO: 68169 - RNA, 19 nt, synthetic construct
  misc_feature 1..19: note = siRNA antisense sequence
  source 1..19: mol_type = other RNA
gagcaacctaggagcttat

SEQ ID NO: 68170 - RNA, 19 nt, synthetic construct
  misc_feature 1..19: note = siRNA sense sequence
  source 1..19: mol_type = other RNA
taagctcctaggttgctcc

SEQ ID NO: 68171 - RNA, 19 nt, synthetic construct
  misc_feature 1..19: note = siRNA antisense sequence
  source 1..19: mol_type = other RNA
ggagcaacctaggagctta

SEQ ID NO: 68172 - RNA, 19 nt, synthetic construct
  misc_feature 1..19: note = siRNA sense sequence
  source 1..19: mol_type = other RNA
aagctcctaggttgctcca

SEQ ID NO: 68173 - RNA, 19 nt, synthetic construct
  misc_feature 1..19: note = siRNA antisense sequence
  source 1..19: mol_type = other RNA
tggagcaacctaggagctt

SEQ ID NO: 68174 - RNA, 19 nt, synthetic construct
  misc_feature 1..19: note = siRNA sense sequence
  source 1..19: mol_type = other RNA
tcctaggttgctccatttc

SEQ ID NO: 68175 - RNA, 19 nt, synthetic construct
  misc_feature 1..19: note = siRNA antisense sequence
  source 1..19: mol_type = other RNA
gaaatggagcaacctagga

SEQ ID NO: 68176 - RNA, 19 nt, synthetic construct
  misc_feature 1..19: note = siRNA sense sequence
  source 1..19: mol_type = other RNA
cctaggttgctccatttct

SEQ ID NO: 68177 - RNA, 19 nt, synthetic construct
  misc_feature 1..19: note = siRNA antisense sequence
  source 1..19: mol_type = other RNA
agaaatggagcaacctagg

SEQ ID NO: 68178 - RNA, 19 nt, synthetic construct
  misc_feature 1..19: note = siRNA sense sequence
  source 1..19: mol_type = other RNA
ctaggttgctccatttctt

SEQ ID NO: 68179 - RNA, 19 nt, synthetic construct
  misc_feature 1..19: note = siRNA antisense sequence
  source 1..19: mol_type = other RNA
aagaaatggagcaacctag

SEQ ID NO: 68180 - RNA, 19 nt, synthetic construct
  misc_feature 1..19: note = siRNA sense sequence
  source 1..19: mol_type = other RNA
taggttgctccatttctta

SEQ ID NO: 68181 - RNA, 19 nt, synthetic construct
  misc_feature 1..19: note = siRNA antisense sequence
  source 1..19: mol_type = other RNA
taagaaatggagcaaccta

SEQ ID NO: 68182 - RNA, 19 nt, synthetic construct
  misc_feature 1..19: note = siRNA sense sequence
  source 1..19: mol_type = other RNA
aggttgctccatttcttag

SEQ ID NO: 68183 - RNA, 19 nt, synthetic construct
  misc_feature 1..19: note = siRNA antisense sequence
  source 1..19: mol_type = other RNA
ctaagaaatggagcaacct

SEQ ID NO: 68184 - RNA, 19 nt, synthetic construct
  misc_feature 1..19: note = siRNA sense sequence
  source 1..19: mol_type = other RNA
gttgctccatttcttagga

SEQ ID NO: 68185 - RNA, 19 nt, synthetic construct
  misc_feature 1..19: note = siRNA antisense sequence
  source 1..19: mol_type = other RNA
tcctaagaaatggagcaac

SEQ ID NO: 68186 - RNA, 19 nt, synthetic construct
  misc_feature 1..19: note = siRNA sense sequence
  source 1..19: mol_type = other RNA
actactgctgtaaagtttg

SEQ ID NO: 68187 - RNA, 19 nt, synthetic construct
  misc_feature 1..19: note = siRNA antisense sequence
  source 1..19: mol_type = other RNA
caaactttacagcagtagt

SEQ ID NO: 68188 - RNA, 19 nt, synthetic construct
  misc_feature 1..19: note = siRNA sense sequence
  source 1..19: mol_type = other RNA
ctactgctgtaaagtttgc

SEQ ID NO: 68189 - RNA, 19 nt, synthetic construct
  misc_feature 1..19: note = siRNA antisense sequence
  source 1..19: mol_type = other RNA
gcaaactttacagcagtag

SEQ ID NO: 68190 - RNA, 19 nt, synthetic construct
  misc_feature 1..19: note = siRNA sense sequence
  source 1..19: mol_type = other RNA
tactgctgtaaagtttgct

SEQ ID NO: 68191 - RNA, 19 nt, synthetic construct
  misc_feature 1..19: note = siRNA antisense sequence
  source 1..19: mol_type = other RNA
agcaaactttacagcagta

SEQ ID NO: 68192 - RNA, 19 nt, synthetic construct
  misc_feature 1..19: note = siRNA sense sequence
  source 1..19: mol_type = other RNA
actgctgtaaagtttgctg

SEQ ID NO: 68193 - RNA, 19 nt, synthetic construct
  misc_feature 1..19: note = siRNA antisense sequence
  source 1..19: mol_type = other RNA
cagcaaactttacagcagt

SEQ ID NO: 68194 - RNA, 19 nt, synthetic construct
  misc_feature 1..19: note = siRNA sense sequence
  source 1..19: mol_type = other RNA
ctgctgtaaagtttgctga

SEQ ID NO: 68195 - RNA, 19 nt, synthetic construct
  misc_feature 1..19: note = siRNA antisense sequence
  source 1..19: mol_type = other RNA
tcagcaaactttacagcag

SEQ ID NO: 68196 - RNA, 19 nt, synthetic construct
  misc_feature 1..19: note = siRNA sense sequence
  source 1..19: mol_type = other RNA
tgctgtaaagtttgctgac

SEQ ID NO: 68197 - RNA, 19 nt, synthetic construct
  misc_feature 1..19: note = siRNA antisense sequence
  source 1..19: mol_type = other RNA
gtcagcaaactttacagca

SEQ ID NO: 68198 - RNA, 19 nt, synthetic construct
  misc_feature 1..19: note = siRNA sense sequence
  source 1..19: mol_type = other RNA
gctgtaaagtttgctgaca

SEQ ID NO: 68199 - RNA, 19 nt, synthetic construct
  misc_feature 1..19: note = siRNA antisense sequence
  source 1..19: mol_type = other RNA
tgtcagcaaactttacagc

SEQ ID NO: 68200 - RNA, 19 nt, synthetic construct
  misc_feature 1..19: note = siRNA sense sequence
  source 1..19: mol_type = other RNA
ctgtaaagtttgctgacat

SEQ ID NO: 68201 - RNA, 19 nt, synthetic construct
  misc_feature 1..19: note = siRNA antisense sequence
  source 1..19: mol_type = other RNA
atgtcagcaaactttacag

SEQ ID NO: 68202 - RNA, 19 nt, synthetic construct
  misc_feature 1..19: note = siRNA sense sequence
  source 1..19: mol_type = other RNA
tgtaaagtttgctgacatt

SEQ ID NO: 68203 - RNA, 19 nt, synthetic construct
  misc_feature 1..19: note = siRNA antisense sequence
  source 1..19: mol_type = other RNA
aatgtcagcaaactttaca

SEQ ID NO: 68204 - RNA, 19 nt, synthetic construct
  misc_feature 1..19: note = siRNA sense sequence
  source 1..19: mol_type = other RNA
gtaaagtttgctgacattt

SEQ ID NO: 68205 - RNA, 19 nt, synthetic construct
  misc_feature 1..19: note = siRNA antisense sequence
  source 1..19: mol_type = other RNA
aaatgtcagcaaactttac

SEQ ID NO: 68206 - RNA, 19 nt, synthetic construct
  misc_feature 1..19: note = siRNA sense sequence
  source 1..19: mol_type = other RNA
aaagtttgctgacatttct

SEQ ID NO: 68207 - RNA, 19 nt, synthetic construct
  misc_feature 1..19: note = siRNA antisense sequence
  source 1..19: mol_type = other RNA
agaaatgtcagcaaacttt

SEQ ID NO: 68208 - RNA, 19 nt, synthetic construct
  misc_feature 1..19: note = siRNA sense sequence
  source 1..19: mol_type = other RNA
aagtttgctgacatttctg

SEQ ID NO: 68209 - RNA, 19 nt, synthetic construct
  misc_feature 1..19: note = siRNA antisense sequence
  source 1..19: mol_type = other RNA
cagaaatgtcagcaaactt

SEQ ID NO: 68210 - RNA, 19 nt, synthetic construct
  misc_feature 1..19: note = siRNA sense sequence
  source 1..19: mol_type = other RNA
aactcctgggctctgcttt

SEQ ID NO: 68211 - RNA, 19 nt, synthetic construct
  misc_feature 1..19: note = siRNA antisense sequence
  source 1..19: mol_type = other RNA
aaagcagagcccaggagtt

SEQ ID NO: 68212 - RNA, 19 nt, synthetic construct
  misc_feature 1..19: note = siRNA sense sequence
  source 1..19: mol_type = other RNA
tgggctctgctttgttcaa

SEQ ID NO: 68213 - RNA, 19 nt, synthetic construct
  misc_feature 1..19: note = siRNA antisense sequence
  source 1..19: mol_type = other RNA
ttgaacaaagcagagccca

SEQ ID NO: 68214 - RNA, 19 nt, synthetic construct
  misc_feature 1..19: note = siRNA sense sequence
  source 1..19: mol_type = other RNA
gggctctgctttgttcaaa

SEQ ID NO: 68215 - RNA, 19 nt, synthetic construct
  misc_feature 1..19: note = siRNA antisense sequence
  source 1..19: mol_type = other RNA
tttgaacaaagcagagccc

SEQ ID NO: 68216 - RNA, 19 nt, synthetic construct
  misc_feature 1..19: note = siRNA sense sequence
  source 1..19: mol_type = other RNA
tttgttcaaagaggagcaa

SEQ ID NO: 68217 - RNA, 19 nt, synthetic construct
  misc_feature 1..19: note = siRNA antisense sequence
  source 1..19: mol_type = other RNA
ttgctcctctttgaacaaa

SEQ ID NO: 68218 - RNA, 19 nt, synthetic construct
  misc_feature 1..19: note = siRNA sense sequence
  source 1..19: mol_type = other RNA
ttgttcaaagaggagcaaa

SEQ ID NO: 68219 - RNA, 19 nt, synthetic construct
  misc_feature 1..19: note = siRNA antisense sequence
  source 1..19: mol_type = other RNA
tttgctcctctttgaacaa

SEQ ID NO: 68220 - RNA, 19 nt, synthetic construct
  misc_feature 1..19: note = siRNA sense sequence
  source 1..19: mol_type = other RNA
tgttcaaagaggagcaaat

SEQ ID NO: 68221 - RNA, 19 nt, synthetic construct
  misc_feature 1..19: note = siRNA antisense sequence
  source 1..19: mol_type = other RNA
atttgctcctctttgaaca

SEQ ID NO: 68222 - RNA, 19 nt, synthetic construct
  misc_feature 1..19: note = siRNA sense sequence
  source 1..19: mol_type = other RNA
gttcaaagaggagcaaatc

SEQ ID NO: 68223 - RNA, 19 nt, synthetic construct
  misc_feature 1..19: note = siRNA antisense sequence
  source 1..19: mol_type = other RNA
gatttgctcctctttgaac

SEQ ID NO: 68224 - RNA, 19 nt, synthetic construct
  misc_feature 1..19: note = siRNA sense sequence
  source 1..19: mol_type = other RNA
aaagaggagcaaatccaca

SEQ ID NO: 68225 - RNA, 19 nt, synthetic construct
  misc_feature 1..19: note = siRNA antisense sequence
  source 1..19: mol_type = other RNA
tgtggatttgctcctcttt

SEQ ID NO: 68226 - RNA, 19 nt, synthetic construct
  misc_feature 1..19: note = siRNA sense sequence
  source 1..19: mol_type = other RNA
aggagcaaatccacataga

SEQ ID NO: 68227 - RNA, 19 nt, synthetic construct
  misc_feature 1..19: note = siRNA antisense sequence
  source 1..19: mol_type = other RNA
tctatgtggatttgctcct

SEQ ID NO: 68228 - RNA, 19 nt, synthetic construct
  misc_feature 1..19: note = siRNA sense sequence
  source 1..19: mol_type = other RNA
ggagcaaatccacatagaa

SEQ ID NO: 68229 - RNA, 19 nt, synthetic construct
  misc_feature 1..19: note = siRNA antisense sequence
  source 1..19: mol_type = other RNA
ttctatgtggatttgctcc

SEQ ID NO: 68230 - RNA, 19 nt, synthetic construct
  misc_feature 1..19: note = siRNA sense sequence
  source 1..19: mol_type = other RNA
tttccaaagaatttagctg

SEQ ID NO: 68231 - RNA, 19 nt, synthetic construct
  misc_feature 1..19: note = siRNA antisense sequence
  source 1..19: mol_type = other RNA
cagctaaattctttggaaa

SEQ ID NO: 68232 - RNA, 19 nt, synthetic construct
  misc_feature 1..19: note = siRNA sense sequence
  source 1..19: mol_type = other RNA
ttccaaagaatttagctga

SEQ ID NO: 68233 - RNA, 19 nt, synthetic construct
  misc_feature 1..19: note = siRNA antisense sequence
  source 1..19: mol_type = other RNA
tcagctaaattctttggaa

SEQ ID NO: 68234 - RNA, 19 nt, synthetic construct
  misc_feature 1..19: note = siRNA sense sequence
  source 1..19: mol_type = other RNA
tccaaagaatttagctgaa

SEQ ID NO: 68235 - RNA, 19 nt, synthetic construct
  misc_feature 1..19: note = siRNA antisense sequence
  source 1..19: mol_type = other RNA
ttcagctaaattctttgga

SEQ ID NO: 68236 - RNA, 19 nt, synthetic construct
  misc_feature 1..19: note = siRNA sense sequence
  source 1..19: mol_type = other RNA
ccaaagaatttagctgaag

SEQ ID NO: 68237 - RNA, 19 nt, synthetic construct
  misc_feature 1..19: note = siRNA antisense sequence
  source 1..19: mol_type = other RNA
cttcagctaaattctttgg

SEQ ID NO: 68238 - RNA, 19 nt, synthetic construct
  misc_feature 1..19: note = siRNA sense sequence
  source 1..19: mol_type = other RNA
caaagaatttagctgaaga

SEQ ID NO: 68239 - RNA, 19 nt, synthetic construct
  misc_feature 1..19: note = siRNA antisense sequence
  source 1..19: mol_type = other RNA
tcttcagctaaattctttg

SEQ ID NO: 68240 - RNA, 19 nt, synthetic construct
  misc_feature 1..19: note = siRNA sense sequence
  source 1..19: mol_type = other RNA
aagaatttagctgaagact

SEQ ID NO: 68241 - RNA, 19 nt, synthetic construct
  misc_feature 1..19: note = siRNA antisense sequence
  source 1..19: mol_type = other RNA
agtcttcagctaaattctt

SEQ ID NO: 68242 - RNA, 19 nt, synthetic construct
  misc_feature 1..19: note = siRNA sense sequence
  source 1..19: mol_type = other RNA
tcagcctacctcttgactc

SEQ ID NO: 68243 - RNA, 19 nt, synthetic construct
  misc_feature 1..19: note = siRNA antisense sequence
  source 1..19: mol_type = other RNA
gagtcaagaggtaggctga

SEQ ID NO: 68244 - RNA, 19 nt, synthetic construct
  misc_feature 1..19: note = siRNA sense sequence
  source 1..19: mol_type = other RNA
cagcctacctcttgactct

SEQ ID NO: 68245 - RNA, 19 nt, synthetic construct
  misc_feature 1..19: note = siRNA antisense sequence
  source 1..19: mol_type = other RNA
agagtcaagaggtaggctg

SEQ ID NO: 68246 - RNA, 19 nt, synthetic construct
  misc_feature 1..19: note = siRNA sense sequence
  source 1..19: mol_type = other RNA
agcctacctcttgactctc

SEQ ID NO: 68247 - RNA, 19 nt, synthetic construct
  misc_feature 1..19: note = siRNA antisense sequence
  source 1..19: mol_type = other RNA
gagagtcaagaggtaggct

SEQ ID NO: 68248 - RNA, 19 nt, synthetic construct
  misc_feature 1..19: note = siRNA sense sequence
  source 1..19: mol_type = other RNA
tacctcttgactctccaca

SEQ ID NO: 68249 - RNA, 19 nt, synthetic construct
  misc_feature 1..19: note = siRNA antisense sequence
  source 1..19: mol_type = other RNA
tgtggagagtcaagaggta

SEQ ID NO: 68250 - RNA, 19 nt, synthetic construct
  misc_feature 1..19: note = siRNA sense sequence
  source 1..19: mol_type = other RNA
tctaagatcctgaaggcca

SEQ ID NO: 68251 - RNA, 19 nt, synthetic construct
  misc_feature 1..19: note = siRNA antisense sequence
  source 1..19: mol_type = other RNA
tggccttcaggatcttaga

SEQ ID NO: 68252 - RNA, 19 nt, synthetic construct
  misc_feature 1..19: note = siRNA sense sequence
  source 1..19: mol_type = other RNA
ctaagatcctgaaggccaa

SEQ ID NO: 68253 - RNA, 19 nt, synthetic construct
  misc_feature 1..19: note = siRNA antisense sequence
  source 1..19: mol_type = other RNA
ttggccttcaggatcttag

SEQ ID NO: 68254 - RNA, 19 nt, synthetic construct
  misc_feature 1..19: note = siRNA sense sequence
  source 1..19: mol_type = other RNA
taagatcctgaaggccaaa

SEQ ID NO: 68255 - RNA, 19 nt, synthetic construct
  misc_feature 1..19: note = siRNA antisense sequence
  source 1..19: mol_type = other RNA
tttggccttcaggatctta

SEQ ID NO: 68256 - RNA, 19 nt, synthetic construct
  misc_feature 1..19: note = siRNA sense sequence
  source 1..19: mol_type = other RNA
ctgtgggatgccaaagcca

SEQ ID NO: 68257 - RNA, 19 nt, synthetic construct
  misc_feature 1..19: note = siRNA antisense sequence
  source 1..19: mol_type = other RNA
tggctttggcatcccacag

SEQ ID NO: 68258 - RNA, 19 nt, synthetic construct
  misc_feature 1..19: note = siRNA sense sequence
  source 1..19: mol_type = other RNA
tgccaaagccatcagtagc

SEQ ID NO: 68259 - RNA, 19 nt, synthetic construct
  misc_feature 1..19: note = siRNA antisense sequence
  source 1..19: mol_type = other RNA
gctactgatggctttggca

SEQ ID NO: 68260 - RNA, 19 nt, synthetic construct
  misc_feature 1..19: note = siRNA sense sequence
  source 1..19: mol_type = other RNA
gccaaagccatcagtagct

SEQ ID NO: 68261 - RNA, 19 nt, synthetic construct
  misc_feature 1..19: note = siRNA antisense sequence
  source 1..19: mol_type = other RNA
agctactgatggctttggc

SEQ ID NO: 68262 - RNA, 19 nt, synthetic construct
  misc_feature 1..19: note = siRNA sense sequence
  source 1..19: mol_type = other RNA
ccaaagccatcagtagctg

SEQ ID NO: 68263 - RNA, 19 nt, synthetic construct
  misc_feature 1..19: note = siRNA antisense sequence
  source 1..19: mol_type = other RNA
cagctactgatggctttgg

SEQ ID NO: 68264 - RNA, 19 nt, synthetic construct
  misc_feature 1..19: note = siRNA sense sequence
  source 1..19: mol_type = other RNA
caaagccatcagtagctgg

SEQ ID NO: 68265 - RNA, 19 nt, synthetic construct
  misc_feature 1..19: note = siRNA antisense sequence
  source 1..19: mol_type = other RNA
ccagctactgatggctttg

SEQ ID NO: 68266 - RNA, 19 nt, synthetic construct
  misc_feature 1..19: note = siRNA sense sequence
  source 1..19: mol_type = other RNA
gccatcagtagctggaaga

SEQ ID NO: 68267 - RNA, 19 nt, synthetic construct
  misc_feature 1..19: note = siRNA antisense sequence
  source 1..19: mol_type = other RNA
tcttccagctactgatggc

SEQ ID NO: 68268 - RNA, 19 nt, synthetic construct
  misc_feature 1..19: note = siRNA sense sequence
  source 1..19: mol_type = other RNA
tctttctagaggtttggtg

SEQ ID NO: 68269 - RNA, 19 nt, synthetic construct
  misc_feature 1..19: note = siRNA antisense sequence
  source 1..19: mol_type = other RNA
caccaaacctctagaaaga

SEQ ID NO: 68270 - RNA, 19 nt, synthetic construct
  misc_feature 1..19: note = siRNA sense sequence
  source 1..19: mol_type = other RNA
ctttctagaggtttggtgt

SEQ ID NO: 68271 - RNA, 19 nt, synthetic construct
  misc_feature 1..19: note = siRNA antisense sequence
  source 1..19: mol_type = other RNA
acaccaaacctctagaaag

SEQ ID NO: 68272 - RNA, 19 nt, synthetic construct
  misc_feature 1..19: note = siRNA sense sequence
  source 1..19: mol_type = other RNA
tttctagaggtttggtgtc

SEQ ID NO: 68273 - RNA, 19 nt, synthetic construct
  misc_feature 1..19: note = siRNA antisense sequence
  source 1..19: mol_type = other RNA
gacaccaaacctctagaaa

SEQ ID NO: 68274 - RNA, 19 nt, synthetic construct
  misc_feature 1..19: note = siRNA sense sequence
  source 1..19: mol_type = other RNA
ttctagaggtttggtgtcc

SEQ ID NO: 68275 - RNA, 19 nt, synthetic construct
  misc_feature 1..19: note = siRNA antisense sequence
  source 1..19: mol_type = other RNA
ggacaccaaacctctagaa

SEQ ID NO: 68276 - RNA, 19 nt, synthetic construct
  misc_feature 1..19: note = siRNA sense sequence
  source 1..19: mol_type = other RNA
tctagaggtttggtgtcct

SEQ ID NO: 68277 - RNA, 19 nt, synthetic construct
  misc_feature 1..19: note = siRNA antisense sequence
  source 1..19: mol_type = other RNA
aggacaccaaacctctaga

SEQ ID NO: 68278 - RNA, 19 nt, synthetic construct
  misc_feature 1..19: note = siRNA sense sequence
  source 1..19: mol_type = other RNA
gtttggtgtcctcttgctg

SEQ ID NO: 68279 - RNA, 19 nt, synthetic construct
  misc_feature 1..19: note = siRNA antisense sequence
  source 1..19: mol_type = other RNA
cagcaagaggacaccaaac

SEQ ID NO: 68280 - RNA, 19 nt, synthetic construct
  misc_feature 1..19: note = siRNA sense sequence
  source 1..19: mol_type = other RNA
ggtgtcctcttgctggcct

SEQ ID NO: 68281 - RNA, 19 nt, synthetic construct
  misc_feature 1..19: note = siRNA antisense sequence
  source 1..19: mol_type = other RNA
aggccagcaagaggacacc

SEQ ID NO: 68282 - RNA, 19 nt, synthetic construct
  misc_feature 1..19: note = siRNA sense sequence
  source 1..19: mol_type = other RNA
gtgtcctcttgctggcctg

SEQ ID NO: 68283 - RNA, 19 nt, synthetic construct
  misc_feature 1..19: note = siRNA antisense sequence
  source 1..19: mol_type = other RNA
caggccagcaagaggacac

SEQ ID NO: 68284 - RNA, 19 nt, synthetic construct
  misc_feature 1..19: note = siRNA sense sequence
  source 1..19: mol_type = other RNA
tgtcctcttgctggcctgt

SEQ ID NO: 68285 - RNA, 19 nt, synthetic construct
  misc_feature 1..19: note = siRNA antisense sequence
  source 1..19: mol_type = other RNA
acaggccagcaagaggaca

SEQ ID NO: 68286 - RNA, 19 nt, synthetic construct
  misc_feature 1..19: note = siRNA sense sequence
  source 1..19: mol_type = other RNA
gtcctcttgctggcctgtc

SEQ ID NO: 68287 - RNA, 19 nt, synthetic construct
  misc_feature 1..19: note = siRNA antisense sequence
  source 1..19: mol_type = other RNA
gacaggccagcaagaggac

SEQ ID NO: 68288 - RNA, 19 nt, synthetic construct
  misc_feature 1..19: note = siRNA sense sequence
  source 1..19: mol_type = other RNA
tcctcttgctggcctgtca

SEQ ID NO: 68289 - RNA, 19 nt, synthetic construct
  misc_feature 1..19: note = siRNA antisense sequence
  source 1..19: mol_type = other RNA
tgacaggccagcaagagga

SEQ ID NO: 68290 - RNA, 19 nt, synthetic construct
  misc_feature 1..19: note = siRNA sense sequence
  source 1..19: mol_type = other RNA
cttgctggcctgtcattat

SEQ ID NO: 68291 - RNA, 19 nt, synthetic construct
  misc_feature 1..19: note = siRNA antisense sequence
  source 1..19: mol_type = other RNA
ataatgacaggccagcaag

SEQ ID NO: 68292 - RNA, 19 nt, synthetic construct
  misc_feature 1..19: note = siRNA sense sequence
  source 1..19: mol_type = other RNA
gctggcctgtcattatttg

SEQ ID NO: 68293 - RNA, 19 nt, synthetic construct
  misc_feature 1..19: note = siRNA antisense sequence
  source 1..19: mol_type = other RNA
caaataatgacaggccagc

SEQ ID NO: 68294 - RNA, 19 nt, synthetic construct
  misc_feature 1..19: note = siRNA sense sequence
  source 1..19: mol_type = other RNA
ctggcctgtcattatttgg

SEQ ID NO: 68295 - RNA, 19 nt, synthetic construct
  misc_feature 1..19: note = siRNA antisense sequence
  source 1..19: mol_type = other RNA
ccaaataatgacaggccag

SEQ ID NO: 68296 - RNA, 19 nt, synthetic construct
  misc_feature 1..19: note = siRNA sense sequence
  source 1..19: mol_type = other RNA
tggcctgtcattatttgga

SEQ ID NO: 68297 - RNA, 19 nt, synthetic construct
  misc_feature 1..19: note = siRNA antisense sequence
  source 1..19: mol_type = other RNA
tccaaataatgacaggcca

SEQ ID NO: 68298 - RNA, 19 nt, synthetic construct
  misc_feature 1..19: note = siRNA sense sequence
  source 1..19: mol_type = other RNA
ggcctgtcattatttggaa

SEQ ID NO: 68299 - RNA, 19 nt, synthetic construct
  misc_feature 1..19: note = siRNA antisense sequence
  source 1..19: mol_type = other RNA
ttccaaataatgacaggcc

SEQ ID NO: 68300 - RNA, 19 nt, synthetic construct
  misc_feature 1..19: note = siRNA sense sequence
  source 1..19: mol_type = other RNA
ggaatttccttcattttcg

SEQ ID NO: 68301 - RNA, 19 nt, synthetic construct
  misc_feature 1..19: note = siRNA antisense sequence
  source 1..19: mol_type = other RNA
cgaaaatgaaggaaattcc

SEQ ID NO: 68302 - RNA, 19 nt, synthetic construct
  misc_feature 1..19: note = siRNA sense sequence
  source 1..19: mol_type = other RNA
gaatttccttcattttcgc

SEQ ID NO: 68303 - RNA, 19 nt, synthetic construct
  misc_feature 1..19: note = siRNA antisense sequence
  source 1..19: mol_type = other RNA
gcgaaaatgaaggaaattc

SEQ ID NO: 68304 - RNA, 19 nt, synthetic construct
  misc_feature 1..19: note = siRNA sense sequence
  source 1..19: mol_type = other RNA
aatttccttcattttcgct

SEQ ID NO: 68305 - RNA, 19 nt, synthetic construct
  misc_feature 1..19: note = siRNA antisense sequence
  source 1..19: mol_type = other RNA
agcgaaaatgaaggaaatt

SEQ ID NO: 68306 - RNA, 19 nt, synthetic construct
  misc_feature 1..19: note = siRNA sense sequence
  source 1..19: mol_type = other RNA
atttccttcattttcgcta

SEQ ID NO: 68307 - RNA, 19 nt, synthetic construct
  misc_feature 1..19: note = siRNA antisense sequence
  source 1..19: mol_type = other RNA
tagcgaaaatgaaggaaat

SEQ ID NO: 68308 - RNA, 19 nt, synthetic construct
  misc_feature 1..19: note = siRNA sense sequence
  source 1..19: mol_type = other RNA
tttccttcattttcgctat

SEQ ID NO: 68309 - RNA, 19 nt, synthetic construct
  misc_feature 1..19: note = siRNA antisense sequence
  source 1..19: mol_type = other RNA
atagcgaaaatgaaggaaa

SEQ ID NO: 68310 - RNA, 19 nt, synthetic construct
  misc_feature 1..19: note = siRNA sense sequence
  source 1..19: mol_type = other RNA
ttccttcattttcgctatt

SEQ ID NO: 68311 - RNA, 19 nt, synthetic construct
  misc_feature 1..19: note = siRNA antisense sequence
  source 1..19: mol_type = other RNA
aatagcgaaaatgaaggaa

SEQ ID NO: 68312 - RNA, 19 nt, synthetic construct
  misc_feature 1..19: note = siRNA sense sequence
  source 1..19: mol_type = other RNA
tccttcattttcgctattt

SEQ ID NO: 68313 - RNA, 19 nt, synthetic construct
  misc_feature 1..19: note = siRNA antisense sequence
  source 1..19: mol_type = other RNA
aaatagcgaaaatgaagga

SEQ ID NO: 68314 - RNA, 19 nt, synthetic construct
  misc_feature 1..19: note = siRNA sense sequence
  source 1..19: mol_type = other RNA
ccttcattttcgctatttc

SEQ ID NO: 68315 - RNA, 19 nt, synthetic construct
  misc_feature 1..19: note = siRNA antisense sequence
  source 1..19: mol_type = other RNA
gaaatagcgaaaatgaagg

SEQ ID NO: 68316 - RNA, 19 nt, synthetic construct
  misc_feature 1..19: note = siRNA sense sequence
  source 1..19: mol_type = other RNA
cttcattttcgctatttcc

SEQ ID NO: 68317 - RNA, 19 nt, synthetic construct
  misc_feature 1..19: note = siRNA antisense sequence
  source 1..19: mol_type = other RNA
ggaaatagcgaaaatgaag

SEQ ID NO: 68318 - RNA, 19 nt, synthetic construct
  misc_feature 1..19: note = siRNA sense sequence
  source 1..19: mol_type = other RNA
ttcattttcgctatttcca

SEQ ID NO: 68319 - RNA, 19 nt, synthetic construct
  misc_feature 1..19: note = siRNA antisense sequence
  source 1..19: mol_type = other RNA
tggaaatagcgaaaatgaa

SEQ ID NO: 68320 - RNA, 19 nt, synthetic construct
  misc_feature 1..19: note = siRNA sense sequence
  source 1..19: mol_type = other RNA
tcattttcgctatttccag

SEQ ID NO: 68321 - RNA, 19 nt, synthetic construct
  misc_feature 1..19: note = siRNA antisense sequence
  source 1..19: mol_type = other RNA
ctggaaatagcgaaaatga

SEQ ID NO: 68322 - RNA, 19 nt, synthetic construct
  misc_feature 1..19: note = siRNA sense sequence
  source 1..19: mol_type = other RNA
cattttcgctatttccagg

SEQ ID NO: 68323 - RNA, 19 nt, synthetic construct
  misc_feature 1..19: note = siRNA antisense sequence
  source 1..19: mol_type = other RNA
cctggaaatagcgaaaatg

SEQ ID NO: 68324 - RNA, 19 nt, synthetic construct
  misc_feature 1..19: note = siRNA sense sequence
  source 1..19: mol_type = other RNA
attttcgctatttccaggt

SEQ ID NO: 68325 - RNA, 19 nt, synthetic construct
  misc_feature 1..19: note = siRNA antisense sequence
  source 1..19: mol_type = other RNA
acctggaaatagcgaaaat

SEQ ID NO: 68326 - RNA, 19 nt, synthetic construct
  misc_feature 1..19: note = siRNA sense sequence
  source 1..19: mol_type = other RNA
tcgctatttccaggttcag

SEQ ID NO: 68327 - RNA, 19 nt, synthetic construct
  misc_feature 1..19: note = siRNA antisense sequence
  source 1..19: mol_type = other RNA
ctgaacctggaaatagcga

SEQ ID NO: 68328 - RNA, 19 nt, synthetic construct
  misc_feature 1..19: note = siRNA sense sequence
  source 1..19: mol_type = other RNA
cgctatttccaggttcaga

SEQ ID NO: 68329 - RNA, 19 nt, synthetic construct
  misc_feature 1..19: note = siRNA antisense sequence
  source 1..19: mol_type = other RNA
tctgaacctggaaatagcg

SEQ ID NO: 68330 - RNA, 19 nt, synthetic construct
  misc_feature 1..19: note = siRNA sense sequence
  source 1..19: mol_type = other RNA
gctatttccaggttcagaa

SEQ ID NO: 68331 - RNA, 19 nt, synthetic construct
  misc_feature 1..19: note = siRNA antisense sequence
  source 1..19: mol_type = other RNA
ttctgaacctggaaatagc

SEQ ID NO: 68332 - RNA, 19 nt, synthetic construct
  misc_feature 1..19: note = siRNA sense sequence
  source 1..19: mol_type = other RNA
aatcatacctaccacttgt

SEQ ID NO: 68333 - RNA, 19 nt, synthetic construct
  misc_feature 1..19: note = siRNA antisense sequence
  source 1..19: mol_type = other RNA
acaagtggtaggtatgatt

SEQ ID NO: 68334 - RNA, 19 nt, synthetic construct
  misc_feature 1..19: note = siRNA sense sequence
  source 1..19: mol_type = other RNA
atcatacctaccacttgtt

SEQ ID NO: 68335 - RNA, 19 nt, synthetic construct
  misc_feature 1..19: note = siRNA antisense sequence
  source 1..19: mol_type = other RNA
aacaagtggtaggtatgat

SEQ ID NO: 68336 - RNA, 19 nt, synthetic construct
  misc_feature 1..19: note = siRNA sense sequence
  source 1..19: mol_type = other RNA
tcatacctaccacttgttc

SEQ ID NO: 68337 - RNA, 19 nt, synthetic construct
  misc_feature 1..19: note = siRNA antisense sequence
  source 1..19: mol_type = other RNA
gaacaagtggtaggtatga

SEQ ID NO: 68338 - RNA, 19 nt, synthetic construct
  misc_feature 1..19: note = siRNA sense sequence
  source 1..19: mol_type = other RNA
catacctaccacttgttct

SEQ ID NO: 68339 - RNA, 19 nt, synthetic construct
  misc_feature 1..19: note = siRNA antisense sequence
  source 1..19: mol_type = other RNA
agaacaagtggtaggtatg

SEQ ID NO: 68340 - RNA, 19 nt, synthetic construct
  misc_feature 1..19: note = siRNA sense sequence
  source 1..19: mol_type = other RNA
atacctaccacttgttctt

SEQ ID NO: 68341 - RNA, 19 nt, synthetic construct
  misc_feature 1..19: note = siRNA antisense sequence
  source 1..19: mol_type = other RNA
aagaacaagtggtaggtat

SEQ ID NO: 68342 - RNA, 19 nt, synthetic construct
  misc_feature 1..19: note = siRNA sense sequence
  source 1..19: mol_type = other RNA
ctaccacttgttctttctt

SEQ ID NO: 68343 - RNA, 19 nt, synthetic construct
  misc_feature 1..19: note = siRNA antisense sequence
  source 1..19: mol_type = other RNA
aagaaagaacaagtggtag

SEQ ID NO: 68344 - RNA, 19 nt, synthetic construct
  misc_feature 1..19: note = siRNA sense sequence
  source 1..19: mol_type = other RNA
cacttgttctttctttgcc

SEQ ID NO: 68345 - RNA, 19 nt, synthetic construct
  misc_feature 1..19: note = siRNA antisense sequence
  source 1..19: mol_type = other RNA
ggcaaagaaagaacaagtg

SEQ ID NO: 68346 - RNA, 19 nt, synthetic construct
  misc_feature 1..19: note = siRNA sense sequence
  source 1..19: mol_type = other RNA
acttgttctttctttgccc

SEQ ID NO: 68347 - RNA, 19 nt, synthetic construct
  misc_feature 1..19: note = siRNA antisense sequence
  source 1..19: mol_type = other RNA
gggcaaagaaagaacaagt

SEQ ID NO: 68348 - RNA, 19 nt, synthetic construct
  misc_feature 1..19: note = siRNA sense sequence
  source 1..19: mol_type = other RNA
tgttctttctttgcccagt

SEQ ID NO: 68349 - RNA, 19 nt, synthetic construct
  misc_feature 1..19: note = siRNA antisense sequence
  source 1..19: mol_type = other RNA
actgggcaaagaaagaaca

SEQ ID NO: 68350 - RNA, 19 nt, synthetic construct
  misc_feature 1..19: note = siRNA sense sequence
  source 1..19: mol_type = other RNA
gttctttctttgcccagta

SEQ ID NO: 68351 - RNA, 19 nt, synthetic construct
  misc_feature 1..19: note = siRNA antisense sequence
  source 1..19: mol_type = other RNA
tactgggcaaagaaagaac

SEQ ID NO: 68352 - RNA, 19 nt, synthetic construct
  misc_feature 1..19: note = siRNA sense sequence
  source 1..19: mol_type = other RNA
ttctttctttgcccagtaa

SEQ ID NO: 68353 - RNA, 19 nt, synthetic construct
  misc_feature 1..19: note = siRNA antisense sequence
  source 1..19: mol_type = other RNA
ttactgggcaaagaaagaa

SEQ ID NO: 68354 - RNA, 19 nt, synthetic construct
  misc_feature 1..19: note = siRNA sense sequence
  source 1..19: mol_type = other RNA
tctttctttgcccagtaaa

SEQ ID NO: 68355 - RNA, 19 nt, synthetic construct
  misc_feature 1..19: note = siRNA antisense sequence
  source 1..19: mol_type = other RNA
tttactgggcaaagaaaga

SEQ ID NO: 68356 - RNA, 19 nt, synthetic construct
  misc_feature 1..19: note = siRNA sense sequence
  source 1..19: mol_type = other RNA
ctcagggtttctcttattc

SEQ ID NO: 68357 - RNA, 19 nt, synthetic construct
  misc_feature 1..19: note = siRNA antisense sequence
  source 1..19: mol_type = other RNA
gaataagagaaaccctgag

SEQ ID NO: 68358 - RNA, 19 nt, synthetic construct
  misc_feature 1..19: note = siRNA sense sequence
  source 1..19: mol_type = other RNA
tcagggtttctcttattca

SEQ ID NO: 68359 - RNA, 19 nt, synthetic construct
  misc_feature 1..19: note = siRNA antisense sequence
  source 1..19: mol_type = other RNA
tgaataagagaaaccctga

SEQ ID NO: 68360 - RNA, 19 nt, synthetic construct
  misc_feature 1..19: note = siRNA sense sequence
  source 1..19: mol_type = other RNA
cagggtttctcttattcag

SEQ ID NO: 68361 - RNA, 19 nt, synthetic construct
  misc_feature 1..19: note = siRNA antisense sequence
  source 1..19: mol_type = other RNA
ctgaataagagaaaccctg

SEQ ID NO: 68362 - RNA, 19 nt, synthetic construct
  misc_feature 1..19: note = siRNA sense sequence
  source 1..19: mol_type = other RNA
agggtttctcttattcaga

SEQ ID NO: 68363 - RNA, 19 nt, synthetic construct
  misc_feature 1..19: note = siRNA antisense sequence
  source 1..19: mol_type = other RNA
tctgaataagagaaaccct

SEQ ID NO: 68364 - RNA, 19 nt, synthetic construct
  misc_feature 1..19: note = siRNA sense sequence
  source 1..19: mol_type = other RNA
tcttattcagagttaccat

SEQ ID NO: 68365 - RNA, 19 nt, synthetic construct
  misc_feature 1..19: note = siRNA antisense sequence
  source 1..19: mol_type = other RNA
atggtaactctgaataaga

SEQ ID NO: 68366 - RNA, 19 nt, synthetic construct
  misc_feature 1..19: note = siRNA sense sequence
  source 1..19: mol_type = other RNA
cttattcagagttaccatg

SEQ ID NO: 68367 - RNA, 19 nt, synthetic construct
  misc_feature 1..19: note = siRNA antisense sequence
  source 1..19: mol_type = other RNA
catggtaactctgaataag

SEQ ID NO: 68368 - RNA, 19 nt, synthetic construct
  misc_feature 1..19: note = siRNA sense sequence
  source 1..19: mol_type = other RNA
attcagagttaccatgttg

SEQ ID NO: 68369 - RNA, 19 nt, synthetic construct
  misc_feature 1..19: note = siRNA antisense sequence
  source 1..19: mol_type = other RNA
caacatggtaactctgaat

SEQ ID NO: 68370 - RNA, 19 nt, synthetic construct
  misc_feature 1..19: note = siRNA sense sequence
  source 1..19: mol_type = other RNA
ttcagagttaccatgttgc

SEQ ID NO: 68371 - RNA, 19 nt, synthetic construct
  misc_feature 1..19: note = siRNA antisense sequence
  source 1..19: mol_type = other RNA
gcaacatggtaactctgaa

SEQ ID NO: 68372 - RNA, 19 nt, synthetic construct
  misc_feature 1..19: note = siRNA sense sequence
  source 1..19: mol_type = other RNA
tcagagttaccatgttgca

SEQ ID NO: 68373 - RNA, 19 nt, synthetic construct
  misc_feature 1..19: note = siRNA antisense sequence
  source 1..19: mol_type = other RNA
tgcaacatggtaactctga

SEQ ID NO: 68374 - RNA, 19 nt, synthetic construct
  misc_feature 1..19: note = siRNA sense sequence
  source 1..19: mol_type = other RNA
agtgctcagcctgcccaga

SEQ ID NO: 68375 - RNA, 19 nt, synthetic construct
  misc_feature 1..19: note = siRNA antisense sequence
  source 1..19: mol_type = other RNA
tctgggcaggctgagcact

SEQ ID NO: 68376 - RNA, 19 nt, synthetic construct
  misc_feature 1..19: note = siRNA sense sequence
  source 1..19: mol_type = other RNA
gtgctcagcctgcccagaa

SEQ ID NO: 68377 - RNA, 19 nt, synthetic construct
  misc_feature 1..19: note = siRNA antisense sequence
  source 1..19: mol_type = other RNA
ttctgggcaggctgagcac

SEQ ID NO: 68378 - RNA, 19 nt, synthetic construct
  misc_feature 1..19: note = siRNA sense sequence
  source 1..19: mol_type = other RNA
agcccttctctgatctcag

SEQ ID NO: 68379 - RNA, 19 nt, synthetic construct
  misc_feature 1..19: note = siRNA antisense sequence
  source 1..19: mol_type = other RNA
ctgagatcagagaagggct

SEQ ID NO: 68380 - RNA, 19 nt, synthetic construct
  misc_feature 1..19: note = siRNA sense sequence
  source 1..19: mol_type = other RNA
ttctctgatctcagcaaga

SEQ ID NO: 68381 - RNA, 19 nt, synthetic construct
  misc_feature 1..19: note = siRNA antisense sequence
  source 1..19: mol_type = other RNA
tcttgctgagatcagagaa

SEQ ID NO: 68382 - RNA, 19 nt, synthetic construct
  misc_feature 1..19: note = siRNA sense sequence
  source 1..19: mol_type = other RNA
tctcagcaagatcttagta

SEQ ID NO: 68383 - RNA, 19 nt, synthetic construct
  misc_feature 1..19: note = siRNA antisense sequence
  source 1..19: mol_type = other RNA
tactaagatcttgctgaga

SEQ ID NO: 68384 - RNA, 19 nt, synthetic construct
  misc_feature 1..19: note = siRNA sense sequence
  source 1..19: mol_type = other RNA
ctcagcaagatcttagtag

SEQ ID NO: 68385 - RNA, 19 nt, synthetic construct
  misc_feature 1..19: note = siRNA antisense sequence
  source 1..19: mol_type = other RNA
ctactaagatcttgctgag

SEQ ID NO: 68386 - RNA, 19 nt, synthetic construct
  misc_feature 1..19: note = siRNA sense sequence
  source 1..19: mol_type = other RNA
tcagcaagatcttagtagt

SEQ ID NO: 68387 - RNA, 19 nt, synthetic construct
  misc_feature 1..19: note = siRNA antisense sequence
  source 1..19: mol_type = other RNA
actactaagatcttgctga

SEQ ID NO: 68388 - RNA, 19 nt, synthetic construct
  misc_feature 1..19: note = siRNA sense sequence
  source 1..19: mol_type = other RNA
cagcaagatcttagtagta

SEQ ID NO: 68389 - RNA, 19 nt, synthetic construct
  misc_feature 1..19: note = siRNA antisense sequence
  source 1..19: mol_type = other RNA
tactactaagatcttgctg

SEQ ID NO: 68390 - RNA, 19 nt, synthetic construct
  misc_feature 1..19: note = siRNA sense sequence
  source 1..19: mol_type = other RNA
agcaagatcttagtagtaa

SEQ ID NO: 68391 - RNA, 19 nt, synthetic construct
  misc_feature 1..19: note = siRNA antisense sequence
  source 1..19: mol_type = other RNA
ttactactaagatcttgct

SEQ ID NO: 68392 - RNA, 19 nt, synthetic construct
  misc_feature 1..19: note = siRNA sense sequence
  source 1..19: mol_type = other RNA
gcaagatcttagtagtaaa

SEQ ID NO: 68393 - RNA, 19 nt, synthetic construct
  misc_feature 1..19: note = siRNA antisense sequence
  source 1..19: mol_type = other RNA
tttactactaagatcttgc

SEQ ID NO: 68394 - RNA, 19 nt, synthetic construct
  misc_feature 1..19: note = siRNA sense sequence
  source 1..19: mol_type = other RNA
aaattcatactcagcatct

SEQ ID NO: 68395 - RNA, 19 nt, synthetic construct
  misc_feature 1..19: note = siRNA antisense sequence
  source 1..19: mol_type = other RNA
agatgctgagtatgaattt

SEQ ID NO: 68396 - RNA, 19 nt, synthetic construct
  misc_feature 1..19: note = siRNA sense sequence
  source 1..19: mol_type = other RNA
aattcatactcagcatctg

SEQ ID NO: 68397 - RNA, 19 nt, synthetic construct
  misc_feature 1..19: note = siRNA antisense sequence
  source 1..19: mol_type = other RNA
cagatgctgagtatgaatt

SEQ ID NO: 68398 - RNA, 19 nt, synthetic construct
  misc_feature 1..19: note = siRNA sense sequence
  source 1..19: mol_type = other RNA
attcatactcagcatctgt

SEQ ID NO: 68399 - RNA, 19 nt, synthetic construct
  misc_feature 1..19: note = siRNA antisense sequence
  source 1..19: mol_type = other RNA
acagatgctgagtatgaat

SEQ ID NO: 68400 - RNA, 19 nt, synthetic construct
  misc_feature 1..19: note = siRNA sense sequence
  source 1..19: mol_type = other RNA
ttcatactcagcatctgtg

SEQ ID NO: 68401 - RNA, 19 nt, synthetic construct
  misc_feature 1..19: note = siRNA antisense sequence
  source 1..19: mol_type = other RNA
cacagatgctgagtatgaa

SEQ ID NO: 68402 - RNA, 19 nt, synthetic construct
  misc_feature 1..19: note = siRNA sense sequence
  source 1..19: mol_type = other RNA
tactcagcatctgtgacta

SEQ ID NO: 68403 - RNA, 19 nt, synthetic construct
  misc_feature 1..19: note = siRNA antisense sequence
  source 1..19: mol_type = other RNA
tagtcacagatgctgagta

SEQ ID NO: 68404 - RNA, 19 nt, synthetic construct
  misc_feature 1..19: note = siRNA sense sequence
  source 1..19: mol_type = other RNA
actcagcatctgtgactac

SEQ ID NO: 68405 - RNA, 19 nt, synthetic construct
  misc_feature 1..19: note = siRNA antisense sequence
  source 1..19: mol_type = other RNA
gtagtcacagatgctgagt

SEQ ID NO: 68406 - RNA, 19 nt, synthetic construct
  misc_feature 1..19: note = siRNA sense sequence
  source 1..19: mol_type = other RNA
ctcagcatctgtgactact

SEQ ID NO: 68407 - RNA, 19 nt, synthetic construct
  misc_feature 1..19: note = siRNA antisense sequence
  source 1..19: mol_type = other RNA
agtagtcacagatgctgag

SEQ ID NO: 68408 - RNA, 19 nt, synthetic construct
  misc_feature 1..19: note = siRNA sense sequence
  source 1..19: mol_type = other RNA
tcagcatctgtgactacta

SEQ ID NO: 68409 - RNA, 19 nt, synthetic construct
  misc_feature 1..19: note = siRNA antisense sequence
  source 1..19: mol_type = other RNA
tagtagtcacagatgctga

SEQ ID NO: 68410 - RNA, 19 nt, synthetic construct
  misc_feature 1..19: note = siRNA sense sequence
  source 1..19: mol_type = other RNA
catctgtgactactagaca

SEQ ID NO: 68411 - RNA, 19 nt, synthetic construct
  misc_feature 1..19: note = siRNA antisense sequence
  source 1..19: mol_type = other RNA
tgtctagtagtcacagatg

SEQ ID NO: 68412 - RNA, 19 nt, synthetic construct
  misc_feature 1..19: note = siRNA sense sequence
  source 1..19: mol_type = other RNA
agaggaagagctgttggcc

SEQ ID NO: 68413 - RNA, 19 nt, synthetic construct
  misc_feature 1..19: note = siRNA antisense sequence
  source 1..19: mol_type = other RNA
ggccaacagctcttcctct

SEQ ID NO: 68414 - RNA, 19 nt, synthetic construct
  misc_feature 1..19: note = siRNA sense sequence
  source 1..19: mol_type = other RNA
gaggaagagctgttggcca

SEQ ID NO: 68415 - RNA, 19 nt, synthetic construct
  misc_feature 1..19: note = siRNA antisense sequence
  source 1..19: mol_type = other RNA
tggccaacagctcttcctc

SEQ ID NO: 68416 - RNA, 19 nt, synthetic construct
  misc_feature 1..19: note = siRNA sense sequence
  source 1..19: mol_type = other RNA
ggaagagctgttggccaga

SEQ ID NO: 68417 - RNA, 19 nt, synthetic construct
  misc_feature 1..19: note = siRNA antisense sequence
  source 1..19: mol_type = other RNA
tctggccaacagctcttcc

SEQ ID NO: 68418 - RNA, 19 nt, synthetic construct
  misc_feature 1..19: note = siRNA sense sequence
  source 1..19: mol_type = other RNA
gaagagctgttggccagat

SEQ ID NO: 68419 - RNA, 19 nt, synthetic construct
  misc_feature 1..19: note = siRNA antisense sequence
  source 1..19: mol_type = other RNA
atctggccaacagctcttc

SEQ ID NO: 68420 - RNA, 19 nt, synthetic construct
  misc_feature 1..19: note = siRNA sense sequence
  source 1..19: mol_type = other RNA
aagagctgttggccagatc

SEQ ID NO: 68421 - RNA, 19 nt, synthetic construct
  misc_feature 1..19: note = siRNA antisense sequence
  source 1..19: mol_type = other RNA
gatctggccaacagctctt

SEQ ID NO: 68422 - RNA, 19 nt, synthetic construct
  misc_feature 1..19: note = siRNA sense sequence
  source 1..19: mol_type = other RNA
agagctgttggccagatca

SEQ ID NO: 68423 - RNA, 19 nt, synthetic construct
  misc_feature 1..19: note = siRNA antisense sequence
  source 1..19: mol_type = other RNA
tgatctggccaacagctct

SEQ ID NO: 68424 - RNA, 19 nt, synthetic construct
  misc_feature 1..19: note = siRNA sense sequence
  source 1..19: mol_type = other RNA
gctgttggccagatcaaag

SEQ ID NO: 68425 - RNA, 19 nt, synthetic construct
  misc_feature 1..19: note = siRNA antisense sequence
  source 1..19: mol_type = other RNA
ctttgatctggccaacagc

SEQ ID NO: 68426 - RNA, 19 nt, synthetic construct
  misc_feature 1..19: note = siRNA sense sequence
  source 1..19: mol_type = other RNA
cataagtcattcctggcta

SEQ ID NO: 68427 - RNA, 19 nt, synthetic construct
  misc_feature 1..19: note = siRNA antisense sequence
  source 1..19: mol_type = other RNA
tagccaggaatgacttatg

SEQ ID NO: 68428 - RNA, 19 nt, synthetic construct
  misc_feature 1..19: note = siRNA sense sequence
  source 1..19: mol_type = other RNA
ataagtcattcctggctat

SEQ ID NO: 68429 - RNA, 19 nt, synthetic construct
  misc_feature 1..19: note = siRNA antisense sequence
  source 1..19: mol_type = other RNA
atagccaggaatgacttat

SEQ ID NO: 68430 - RNA, 19 nt, synthetic construct
  misc_feature 1..19: note = siRNA sense sequence
  source 1..19: mol_type = other RNA
taagtcattcctggctatt

SEQ ID NO: 68431 - RNA, 19 nt, synthetic construct
  misc_feature 1..19: note = siRNA antisense sequence
  source 1..19: mol_type = other RNA
aatagccaggaatgactta

SEQ ID NO: 68432 - RNA, 19 nt, synthetic construct
  misc_feature 1..19: note = siRNA sense sequence
  source 1..19: mol_type = other RNA
aagtcattcctggctatta

SEQ ID NO: 68433 - RNA, 19 nt, synthetic construct
  misc_feature 1..19: note = siRNA antisense sequence
  source 1..19: mol_type = other RNA
taatagccaggaatgactt

SEQ ID NO: 68434 - RNA, 19 nt, synthetic construct
  misc_feature 1..19: note = siRNA sense sequence
  source 1..19: mol_type = other RNA
agtcattcctggctattaa

SEQ ID NO: 68435 - RNA, 19 nt, synthetic construct
  misc_feature 1..19: note = siRNA antisense sequence
  source 1..19: mol_type = other RNA
ttaatagccaggaatgact

SEQ ID NO: 68436 - RNA, 19 nt, synthetic construct
  misc_feature 1..19: note = siRNA sense sequence
  source 1..19: mol_type = other RNA
gtcattcctggctattaag

SEQ ID NO: 68437 - RNA, 19 nt, synthetic construct
  misc_feature 1..19: note = siRNA antisense sequence
  source 1..19: mol_type = other RNA
cttaatagccaggaatgac

SEQ ID NO: 68438 - RNA, 19 nt, synthetic construct
  misc_feature 1..19: note = siRNA sense sequence
  source 1..19: mol_type = other RNA
tcattcctggctattaagt

SEQ ID NO: 68439 - RNA, 19 nt, synthetic construct
  misc_feature 1..19: note = siRNA antisense sequence
  source 1..19: mol_type = other RNA
acttaatagccaggaatga

SEQ ID NO: 68440 - RNA, 19 nt, synthetic construct
  misc_feature 1..19: note = siRNA sense sequence
  source 1..19: mol_type = other RNA
cattcctggctattaagta

SEQ ID NO: 68441 - RNA, 19 nt, synthetic construct
  misc_feature 1..19: note = siRNA antisense sequence
  source 1..19: mol_type = other RNA
tacttaatagccaggaatg

SEQ ID NO: 68442 - RNA, 19 nt, synthetic construct
  misc_feature 1..19: note = siRNA sense sequence
  source 1..19: mol_type = other RNA
attcctggctattaagtaa

SEQ ID NO: 68443 - RNA, 19 nt, synthetic construct
  misc_feature 1..19: note = siRNA antisense sequence
  source 1..19: mol_type = other RNA
ttacttaatagccaggaat

SEQ ID NO: 68444 - RNA, 19 nt, synthetic construct
  misc_feature 1..19: note = siRNA sense sequence
  source 1..19: mol_type = other RNA
tcctggctattaagtaaaa

SEQ ID NO: 68445 - RNA, 19 nt, synthetic construct
  misc_feature 1..19: note = siRNA antisense sequence
  source 1..19: mol_type = other RNA
ttttacttaatagccagga

SEQ ID NO: 68446 - RNA, 19 nt, synthetic construct
  misc_feature 1..19: note = siRNA sense sequence
  source 1..19: mol_type = other RNA
cctggctattaagtaaaat

SEQ ID NO: 68447 - RNA, 19 nt, synthetic construct
  misc_feature 1..19: note = siRNA antisense sequence
  source 1..19: mol_type = other RNA
attttacttaatagccagg

SEQ ID NO: 68448 - RNA, 19 nt, synthetic construct
  misc_feature 1..19: note = siRNA sense sequence
  source 1..19: mol_type = other RNA
gaagtcctgtttctctaat

SEQ ID NO: 68449 - RNA, 19 nt, synthetic construct
  misc_feature 1..19: note = siRNA antisense sequence
  source 1..19: mol_type = other RNA
attagagaaacaggacttc

SEQ ID NO: 68450 - RNA, 19 nt, synthetic construct
  misc_feature 1..19: note = siRNA sense sequence
  source 1..19: mol_type = other RNA
aagtcctgtttctctaata

SEQ ID NO: 68451 - RNA, 19 nt, synthetic construct
  misc_feature 1..19: note = siRNA antisense sequence
  source 1..19: mol_type = other RNA
tattagagaaacaggactt

SEQ ID NO: 68452 - RNA, 19 nt, synthetic construct
  misc_feature 1..19: note = siRNA sense sequence
  source 1..19: mol_type = other RNA
agtcctgtttctctaatat

SEQ ID NO: 68453 - RNA, 19 nt, synthetic construct
  misc_feature 1..19: note = siRNA antisense sequence
  source 1..19: mol_type = other RNA
atattagagaaacaggact

SEQ ID NO: 68454 - RNA, 19 nt, synthetic construct
  misc_feature 1..19: note = siRNA sense sequence
  source 1..19: mol_type = other RNA
atttgttgaggtttgtgtg

SEQ ID NO: 68455 - RNA, 19 nt, synthetic construct
  misc_feature 1..19: note = siRNA antisense sequence
  source 1..19: mol_type = other RNA
cacacaaacctcaacaaat

SEQ ID NO: 68456 - RNA, 19 nt, synthetic construct
  misc_feature 1..19: note = siRNA sense sequence
  source 1..19: mol_type = other RNA
gtgtgtgtgtgtgtgtgca

SEQ ID NO: 68457 - RNA, 19 nt, synthetic construct
  misc_feature 1..19: note = siRNA antisense sequence
  source 1..19: mol_type = other RNA
tgcacacacacacacacac

SEQ ID NO: 68458 - RNA, 19 nt, synthetic construct
  misc_feature 1..19: note = siRNA sense sequence
  source 1..19: mol_type = other RNA
gtgtgtgtgtgtgcatgtg

SEQ ID NO: 68459 - RNA, 19 nt, synthetic construct
  misc_feature 1..19: note = siRNA antisense sequence
  source 1..19: mol_type = other RNA
cacatgcacacacacacac

SEQ ID NO: 68460 - RNA, 19 nt, synthetic construct
  misc_feature 1..19: note = siRNA sense sequence
  source 1..19: mol_type = other RNA
tgtgtgtgtgtgcatgtgc

SEQ ID NO: 68461 - RNA, 19 nt, synthetic construct
  misc_feature 1..19: note = siRNA antisense sequence
  source 1..19: mol_type = other RNA
gcacatgcacacacacaca

SEQ ID NO: 68462 - RNA, 19 nt, synthetic construct
  misc_feature 1..19: note = siRNA sense sequence
  source 1..19: mol_type = other RNA
gtgtgtgtgtgcatgtgca

SEQ ID NO: 68463 - RNA, 19 nt, synthetic construct
  misc_feature 1..19: note = siRNA antisense sequence
  source 1..19: mol_type = other RNA
tgcacatgcacacacacac

SEQ ID NO: 68464 - RNA, 19 nt, synthetic construct
  misc_feature 1..19: note = siRNA sense sequence
  source 1..19: mol_type = other RNA
caaaagctatatctgcaag

SEQ ID NO: 68465 - RNA, 19 nt, synthetic construct
  misc_feature 1..19: note = siRNA antisense sequence
  source 1..19: mol_type = other RNA
cttgcagatatagcttttg

SEQ ID NO: 68466 - RNA, 19 nt, synthetic construct
  misc_feature 1..19: note = siRNA sense sequence
  source 1..19: mol_type = other RNA
aaaagctatatctgcaaga

SEQ ID NO: 68467 - RNA, 19 nt, synthetic construct
  misc_feature 1..19: note = siRNA antisense sequence
  source 1..19: mol_type = other RNA
tcttgcagatatagctttt

SEQ ID NO: 68468 - RNA, 19 nt, synthetic construct
  misc_feature 1..19: note = siRNA sense sequence
  source 1..19: mol_type = other RNA
caagtacagagcgtttgat

SEQ ID NO: 68469 - RNA, 19 nt, synthetic construct
  misc_feature 1..19: note = siRNA antisense sequence
  source 1..19: mol_type = other RNA
atcaaacgctctgtacttg

SEQ ID NO: 68470 - RNA, 19 nt, synthetic construct
  misc_feature 1..19: note = siRNA sense sequence
  source 1..19: mol_type = other RNA
aagtacagagcgtttgatt

SEQ ID NO: 68471 - RNA, 19 nt, synthetic construct
  misc_feature 1..19: note = siRNA antisense sequence
  source 1..19: mol_type = other RNA
aatcaaacgctctgtactt

SEQ ID NO: 68472 - RNA, 19 nt, synthetic construct
  misc_feature 1..19: note = siRNA sense sequence
  source 1..19: mol_type = other RNA
agtacagagcgtttgatta

SEQ ID NO: 68473 - RNA, 19 nt, synthetic construct
  misc_feature 1..19: note = siRNA antisense sequence
  source 1..19: mol_type = other RNA
taatcaaacgctctgtact

SEQ ID NO: 68474 - RNA, 19 nt, synthetic construct
  misc_feature 1..19: note = siRNA sense sequence
  source 1..19: mol_type = other RNA
gtacagagcgtttgattaa

SEQ ID NO: 68475 - RNA, 19 nt, synthetic construct
  misc_feature 1..19: note = siRNA antisense sequence
  source 1..19: mol_type = other RNA
ttaatcaaacgctctgtac

SEQ ID NO: 68476 - RNA, 19 nt, synthetic construct
  misc_feature 1..19: note = siRNA sense sequence
  source 1..19: mol_type = other RNA
tacagagcgtttgattaaa

SEQ ID NO: 68477 - RNA, 19 nt, synthetic construct
  misc_feature 1..19: note = siRNA antisense sequence
  source 1..19: mol_type = other RNA
tttaatcaaacgctctgta

SEQ ID NO: 68478 - RNA, 19 nt, synthetic construct
  misc_feature 1..19: note = siRNA sense sequence
  source 1..19: mol_type = other RNA
acagagcgtttgattaaaa

SEQ ID NO: 68479 - RNA, 19 nt, synthetic construct
  misc_feature 1..19: note = siRNA antisense sequence
  source 1..19: mol_type = other RNA
ttttaatcaaacgctctgt

SEQ ID NO: 68480 - RNA, 19 nt, synthetic construct
  misc_feature 1..19: note = siRNA sense sequence
  source 1..19: mol_type = other RNA
aaatgtactagactctatc

SEQ ID NO: 68481 - RNA, 19 nt, synthetic construct
  misc_feature 1..19: note = siRNA antisense sequence
  source 1..19: mol_type = other RNA
gatagagtctagtacattt

SEQ ID NO: 68482 - RNA, 19 nt, synthetic construct
  misc_feature 1..19: note = siRNA sense sequence
  source 1..19: mol_type = other RNA
aatgtactagactctatca

SEQ ID NO: 68483 - RNA, 19 nt, synthetic construct
  misc_feature 1..19: note = siRNA antisense sequence
  source 1..19: mol_type = other RNA
tgatagagtctagtacatt

SEQ ID NO: 68484 - RNA, 19 nt, synthetic construct
  misc_feature 1..19: note = siRNA sense sequence
  source 1..19: mol_type = other RNA
atgtactagactctatcat

SEQ ID NO: 68485 - RNA, 19 nt, synthetic construct
  misc_feature 1..19: note = siRNA antisense sequence
  source 1..19: mol_type = other RNA
atgatagagtctagtacat

SEQ ID NO: 68486 - RNA, 19 nt, synthetic construct
  misc_feature 1..19: note = siRNA sense sequence
  source 1..19: mol_type = other RNA
tgtactagactctatcatt

SEQ ID NO: 68487 - RNA, 19 nt, synthetic construct
  misc_feature 1..19: note = siRNA antisense sequence
  source 1..19: mol_type = other RNA
aatgatagagtctagtaca

SEQ ID NO: 68488 - RNA, 19 nt, synthetic construct
  misc_feature 1..19: note = siRNA sense sequence
  source 1..19: mol_type = other RNA
gtactagactctatcattt

SEQ ID NO: 68489 - RNA, 19 nt, synthetic construct
  misc_feature 1..19: note = siRNA antisense sequence
  source 1..19: mol_type = other RNA
aaatgatagagtctagtac

SEQ ID NO: 68490 - RNA, 19 nt, synthetic construct
  misc_feature 1..19: note = siRNA sense sequence
  source 1..19: mol_type = other RNA
actagactctatcatttac

SEQ ID NO: 68491 - RNA, 19 nt, synthetic construct
  misc_feature 1..19: note = siRNA antisense sequence
  source 1..19: mol_type = other RNA
gtaaatgatagagtctagt

SEQ ID NO: 68492 - RNA, 19 nt, synthetic construct
  misc_feature 1..19: note = siRNA sense sequence
  source 1..19: mol_type = other RNA
ctagactctatcatttact

SEQ ID NO: 68493 - RNA, 19 nt, synthetic construct
  misc_feature 1..19: note = siRNA antisense sequence
  source 1..19: mol_type = other RNA
agtaaatgatagagtctag

SEQ ID NO: 68494 - RNA, 19 nt, synthetic construct
  misc_feature 1..19: note = siRNA sense sequence
  source 1..19: mol_type = other RNA
ttctctaactttggtattc

SEQ ID NO: 68495 - RNA, 19 nt, synthetic construct
  misc_feature 1..19: note = siRNA antisense sequence
  source 1..19: mol_type = other RNA
gaataccaaagttagagaa

SEQ ID NO: 68496 - RNA, 19 nt, synthetic construct
  misc_feature 1..19: note = siRNA sense sequence
  source 1..19: mol_type = other RNA
tctctaactttggtattct

SEQ ID NO: 68497 - RNA, 19 nt, synthetic construct
  misc_feature 1..19: note = siRNA antisense sequence
  source 1..19: mol_type = other RNA
agaataccaaagttagaga

SEQ ID NO: 68498 - RNA, 19 nt, synthetic construct
  misc_feature 1..19: note = siRNA sense sequence
  source 1..19: mol_type = other RNA
ctctaactttggtattcta

SEQ ID NO: 68499 - RNA, 19 nt, synthetic construct
  misc_feature 1..19: note = siRNA antisense sequence
  source 1..19: mol_type = other RNA
tagaataccaaagttagag

SEQ ID NO: 68500 - RNA, 19 nt, synthetic construct
  misc_feature 1..19: note = siRNA sense sequence
  source 1..19: mol_type = other RNA
ttgattattgctcccattg

SEQ ID NO: 68501 - RNA, 19 nt, synthetic construct
  misc_feature 1..19: note = siRNA antisense sequence
  source 1..19: mol_type = other RNA
caatgggagcaataatcaa

SEQ ID NO: 68502 - RNA, 19 nt, synthetic construct
  misc_feature 1..19: note = siRNA sense sequence
  source 1..19: mol_type = other RNA
tgattattgctcccattgt

SEQ ID NO: 68503 - RNA, 19 nt, synthetic construct
  misc_feature 1..19: note = siRNA antisense sequence
  source 1..19: mol_type = other RNA
acaatgggagcaataatca

SEQ ID NO: 68504 - RNA, 19 nt, synthetic construct
  misc_feature 1..19: note = siRNA sense sequence
  source 1..19: mol_type = other RNA
gattattgctcccattgta

SEQ ID NO: 68505 - RNA, 19 nt, synthetic construct
  misc_feature 1..19: note = siRNA antisense sequence
  source 1..19: mol_type = other RNA
tacaatgggagcaataatc

SEQ ID NO: 68506 - RNA, 19 nt, synthetic construct
  misc_feature 1..19: note = siRNA sense sequence
  source 1..19: mol_type = other RNA
attattgctcccattgtaa

SEQ ID NO: 68507 - RNA, 19 nt, synthetic construct
  misc_feature 1..19: note = siRNA antisense sequence
  source 1..19: mol_type = other RNA
ttacaatgggagcaataat

SEQ ID NO: 68508 - RNA, 19 nt, synthetic construct
  misc_feature 1..19: note = siRNA sense sequence
  source 1..19: mol_type = other RNA
ttattgctcccattgtaaa

SEQ ID NO: 68509 - RNA, 19 nt, synthetic construct
  misc_feature 1..19: note = siRNA antisense sequence
  source 1..19: mol_type = other RNA
tttacaatgggagcaataa

SEQ ID NO: 68510 - RNA, 19 nt, synthetic construct
  misc_feature 1..19: note = siRNA sense sequence
  source 1..19: mol_type = other RNA
aaccatgtatgcactctct

SEQ ID NO: 68511 - RNA, 19 nt, synthetic construct
  misc_feature 1..19: note = siRNA antisense sequence
  source 1..19: mol_type = other RNA
agagagtgcatacatggtt

SEQ ID NO: 68512 - RNA, 19 nt, synthetic construct
  misc_feature 1..19: note = siRNA sense sequence
  source 1..19: mol_type = other RNA
accatgtatgcactctctt

SEQ ID NO: 68513 - RNA, 19 nt, synthetic construct
  misc_feature 1..19: note = siRNA antisense sequence
  source 1..19: mol_type = other RNA
aagagagtgcatacatggt

SEQ ID NO: 68514 - RNA, 19 nt, synthetic construct
  misc_feature 1..19: note = siRNA sense sequence
  source 1..19: mol_type = other RNA
ccatgtatgcactctcttt

SEQ ID NO: 68515 - RNA, 19 nt, synthetic construct
  misc_feature 1..19: note = siRNA antisense sequence
  source 1..19: mol_type = other RNA
aaagagagtgcatacatgg

SEQ ID NO: 68516 - RNA, 19 nt, synthetic construct
  misc_feature 1..19: note = siRNA sense sequence
  source 1..19: mol_type = other RNA
catgtatgcactctctttt

SEQ ID NO: 68517 - RNA, 19 nt, synthetic construct
  misc_feature 1..19: note = siRNA antisense sequence
  source 1..19: mol_type = other RNA
aaaagagagtgcatacatg

SEQ ID NO: 68518 - RNA, 19 nt, synthetic construct
  misc_feature 1..19: note = siRNA sense sequence
  source 1..19: mol_type = other RNA
atgtatgcactctcttttc

SEQ ID NO: 68519 - RNA, 19 nt, synthetic construct
  misc_feature 1..19: note = siRNA antisense sequence
  source 1..19: mol_type = other RNA
gaaaagagagtgcatacat

SEQ ID NO: 68520 - RNA, 19 nt, synthetic construct
  misc_feature 1..19: note = siRNA sense sequence
  source 1..19: mol_type = other RNA
tgtatgcactctcttttct

SEQ ID NO: 68521 - RNA, 19 nt, synthetic construct
  misc_feature 1..19: note = siRNA antisense sequence
  source 1..19: mol_type = other RNA
agaaaagagagtgcataca

SEQ ID NO: 68522 - RNA, 19 nt, synthetic construct
  misc_feature 1..19: note = siRNA sense sequence
  source 1..19: mol_type = other RNA
gtatgcactctcttttctg

SEQ ID NO: 68523 - RNA, 19 nt, synthetic construct
  misc_feature 1..19: note = siRNA antisense sequence
  source 1..19: mol_type = other RNA
cagaaaagagagtgcatac

SEQ ID NO: 68524 - RNA, 19 nt, synthetic construct
  misc_feature 1..19: note = siRNA sense sequence
  source 1..19: mol_type = other RNA
tatgcactctcttttctga

SEQ ID NO: 68525 - RNA, 19 nt, synthetic construct
  misc_feature 1..19: note = siRNA antisense sequence
  source 1..19: mol_type = other RNA
tcagaaaagagagtgcata

SEQ ID NO: 68526 - RNA, 19 nt, synthetic construct
  misc_feature 1..19: note = siRNA sense sequence
  source 1..19: mol_type = other RNA
tgccaatttccatggtcca

SEQ ID NO: 68527 - RNA, 19 nt, synthetic construct
  misc_feature 1..19: note = siRNA antisense sequence
  source 1..19: mol_type = other RNA
tggaccatggaaattggca

SEQ ID NO: 68528 - RNA, 19 nt, synthetic construct
  misc_feature 1..19: note = siRNA sense sequence
  source 1..19: mol_type = other RNA
gccaatttccatggtccaa

SEQ ID NO: 68529 - RNA, 19 nt, synthetic construct
  misc_feature 1..19: note = siRNA antisense sequence
  source 1..19: mol_type = other RNA
ttggaccatggaaattggc

SEQ ID NO: 68530 - RNA, 19 nt, synthetic construct
  misc_feature 1..19: note = siRNA sense sequence
  source 1..19: mol_type = other RNA
ccaatttccatggtccaaa

SEQ ID NO: 68531 - RNA, 19 nt, synthetic construct
  misc_feature 1..19: note = siRNA antisense sequence
  source 1..19: mol_type = other RNA
tttggaccatggaaattgg

SEQ ID NO: 68532 - RNA, 19 nt, synthetic construct
  misc_feature 1..19: note = siRNA sense sequence
  source 1..19: mol_type = other RNA
tccatggtccaaatattct

SEQ ID NO: 68533 - RNA, 19 nt, synthetic construct
  misc_feature 1..19: note = siRNA antisense sequence
  source 1..19: mol_type = other RNA
agaatatttggaccatgga

SEQ ID NO: 68534 - RNA, 19 nt, synthetic construct
  misc_feature 1..19: note = siRNA sense sequence
  source 1..19: mol_type = other RNA
ccatggtccaaatattctc

SEQ ID NO: 68535 - RNA, 19 nt, synthetic construct
  misc_feature 1..19: note = siRNA antisense sequence
  source 1..19: mol_type = other RNA
gagaatatttggaccatgg

SEQ ID NO: 68536 - RNA, 19 nt, synthetic construct
  misc_feature 1..19: note = siRNA sense sequence
  source 1..19: mol_type = other RNA
catggtccaaatattctct

SEQ ID NO: 68537 - RNA, 19 nt, synthetic construct
  misc_feature 1..19: note = siRNA antisense sequence
  source 1..19: mol_type = other RNA
agagaatatttggaccatg

SEQ ID NO: 68538 - RNA, 19 nt, synthetic construct
  misc_feature 1..19: note = siRNA sense sequence
  source 1..19: mol_type = other RNA
atggtccaaatattctctc

SEQ ID NO: 68539 - RNA, 19 nt, synthetic construct
  misc_feature 1..19: note = siRNA antisense sequence
  source 1..19: mol_type = other RNA
gagagaatatttggaccat

SEQ ID NO: 68540 - RNA, 19 nt, synthetic construct
  misc_feature 1..19: note = siRNA sense sequence
  source 1..19: mol_type = other RNA
tggtccaaatattctctct

SEQ ID NO: 68541 - RNA, 19 nt, synthetic construct
  misc_feature 1..19: note = siRNA antisense sequence
  source 1..19: mol_type = other RNA
agagagaatatttggacca

SEQ ID NO: 68542 - RNA, 19 nt, synthetic construct
  misc_feature 1..19: note = siRNA sense sequence
  source 1..19: mol_type = other RNA
ggtccaaatattctctctc

SEQ ID NO: 68543 - RNA, 19 nt, synthetic construct
  misc_feature 1..19: note = siRNA antisense sequence
  source 1..19: mol_type = other RNA
gagagagaatatttggacc

SEQ ID NO: 68544 - RNA, 19 nt, synthetic construct
  misc_feature 1..19: note = siRNA sense sequence
  source 1..19: mol_type = other RNA
aactaccaaagtgacccta

SEQ ID NO: 68545 - RNA, 19 nt, synthetic construct
  misc_feature 1..19: note = siRNA antisense sequence
  source 1..19: mol_type = other RNA
tagggtcactttggtagtt

SEQ ID NO: 68546 - RNA, 19 nt, synthetic construct
  misc_feature 1..19: note = siRNA sense sequence
  source 1..19: mol_type = other RNA
actaccaaagtgaccctaa

SEQ ID NO: 68547 - RNA, 19 nt, synthetic construct
  misc_feature 1..19: note = siRNA antisense sequence
  source 1..19: mol_type = other RNA
ttagggtcactttggtagt

SEQ ID NO: 68548 - RNA, 19 nt, synthetic construct
  misc_feature 1..19: note = siRNA sense sequence
  source 1..19: mol_type = other RNA
ctaccaaagtgaccctaat

SEQ ID NO: 68549 - RNA, 19 nt, synthetic construct
  misc_feature 1..19: note = siRNA antisense sequence
  source 1..19: mol_type = other RNA
attagggtcactttggtag

SEQ ID NO: 68550 - RNA, 19 nt, synthetic construct
  misc_feature 1..19: note = siRNA sense sequence
  source 1..19: mol_type = other RNA
taccaaagtgaccctaatc

SEQ ID NO: 68551 - RNA, 19 nt, synthetic construct
  misc_feature 1..19: note = siRNA antisense sequence
  source 1..19: mol_type = other RNA
gattagggtcactttggta

SEQ ID NO: 68552 - RNA, 19 nt, synthetic construct
  misc_feature 1..19: note = siRNA sense sequence
  source 1..19: mol_type = other RNA
accaaagtgaccctaatca

SEQ ID NO: 68553 - RNA, 19 nt, synthetic construct
  misc_feature 1..19: note = siRNA antisense sequence
  source 1..19: mol_type = other RNA
tgattagggtcactttggt

SEQ ID NO: 68554 - RNA, 19 nt, synthetic construct
  misc_feature 1..19: note = siRNA sense sequence
  source 1..19: mol_type = other RNA
aagtgaccctaatcagctt

SEQ ID NO: 68555 - RNA, 19 nt, synthetic construct
  misc_feature 1..19: note = siRNA antisense sequence
  source 1..19: mol_type = other RNA
aagctgattagggtcactt

SEQ ID NO: 68556 - RNA, 19 nt, synthetic construct
  misc_feature 1..19: note = siRNA sense sequence
  source 1..19: mol_type = other RNA
agtgaccctaatcagctta

SEQ ID NO: 68557 - RNA, 19 nt, synthetic construct
  misc_feature 1..19: note = siRNA antisense sequence
  source 1..19: mol_type = other RNA
taagctgattagggtcact

SEQ ID NO: 68558 - RNA, 19 nt, synthetic construct
  misc_feature 1..19: note = siRNA sense sequence
  source 1..19: mol_type = other RNA
gtgaccctaatcagcttac

SEQ ID NO: 68559 - RNA, 19 nt, synthetic construct
  misc_feature 1..19: note = siRNA antisense sequence
  source 1..19: mol_type = other RNA
gtaagctgattagggtcac

SEQ ID NO: 68560 - RNA, 19 nt, synthetic construct
  misc_feature 1..19: note = siRNA sense sequence
  source 1..19: mol_type = other RNA
tgaccctaatcagcttaca

SEQ ID NO: 68561 - RNA, 19 nt, synthetic construct
  misc_feature 1..19: note = siRNA antisense sequence
  source 1..19: mol_type = other RNA
tgtaagctgattagggtca

SEQ ID NO: 68562 - RNA, 19 nt, synthetic construct
  misc_feature 1..19: note = siRNA sense sequence
  source 1..19: mol_type = other RNA
aaatgtatctgccacctct

SEQ ID NO: 68563 - RNA, 19 nt, synthetic construct
  misc_feature 1..19: note = siRNA antisense sequence
  source 1..19: mol_type = other RNA
agaggtggcagatacattt

SEQ ID NO: 68564 - RNA, 19 nt, synthetic construct
  misc_feature 1..19: note = siRNA sense sequence
  source 1..19: mol_type = other RNA
aatgtatctgccacctctt

SEQ ID NO: 68565 - RNA, 19 nt, synthetic construct
  misc_feature 1..19: note = siRNA antisense sequence
  source 1..19: mol_type = other RNA
aagaggtggcagatacatt

SEQ ID NO: 68566 - RNA, 19 nt, synthetic construct
  misc_feature 1..19: note = siRNA sense sequence
  source 1..19: mol_type = other RNA
atgtatctgccacctctta

SEQ ID NO: 68567 - RNA, 19 nt, synthetic construct
  misc_feature 1..19: note = siRNA antisense sequence
  source 1..19: mol_type = other RNA
taagaggtggcagatacat

SEQ ID NO: 68568 - RNA, 19 nt, synthetic construct
  misc_feature 1..19: note = siRNA sense sequence
  source 1..19: mol_type = other RNA
tgtatctgccacctcttac

SEQ ID NO: 68569 - RNA, 19 nt, synthetic construct
  misc_feature 1..19: note = siRNA antisense sequence
  source 1..19: mol_type = other RNA
gtaagaggtggcagataca

SEQ ID NO: 68570 - RNA, 19 nt, synthetic construct
  misc_feature 1..19: note = siRNA sense sequence
  source 1..19: mol_type = other RNA
tatctgccacctcttacca

SEQ ID NO: 68571 - RNA, 19 nt, synthetic construct
  misc_feature 1..19: note = siRNA antisense sequence
  source 1..19: mol_type = other RNA
tggtaagaggtggcagata

SEQ ID NO: 68572 - RNA, 19 nt, synthetic construct
  misc_feature 1..19: note = siRNA sense sequence
  source 1..19: mol_type = other RNA
atctgccacctcttaccaa

SEQ ID NO: 68573 - RNA, 19 nt, synthetic construct
  misc_feature 1..19: note = siRNA antisense sequence
  source 1..19: mol_type = other RNA
ttggtaagaggtggcagat

SEQ ID NO: 68574 - RNA, 19 nt, synthetic construct
  misc_feature 1..19: note = siRNA sense sequence
  source 1..19: mol_type = other RNA
ccaaccagtgtgagctgac

SEQ ID NO: 68575 - RNA, 19 nt, synthetic construct
  misc_feature 1..19: note = siRNA antisense sequence
  source 1..19: mol_type = other RNA
gtcagctcacactggttgg

SEQ ID NO: 68576 - RNA, 19 nt, synthetic construct
  misc_feature 1..19: note = siRNA sense sequence
  source 1..19: mol_type = other RNA
caaccagtgtgagctgact

SEQ ID NO: 68577 - RNA, 19 nt, synthetic construct
  misc_feature 1..19: note = siRNA antisense sequence
  source 1..19: mol_type = other RNA
agtcagctcacactggttg

SEQ ID NO: 68578 - RNA, 19 nt, synthetic construct
  misc_feature 1..19: note = siRNA sense sequence
  source 1..19: mol_type = other RNA
aaccagtgtgagctgactt

SEQ ID NO: 68579 - RNA, 19 nt, synthetic construct
  misc_feature 1..19: note = siRNA antisense sequence
  source 1..19: mol_type = other RNA
aagtcagctcacactggtt

SEQ ID NO: 68580 - RNA, 19 nt, synthetic construct
  misc_feature 1..19: note = siRNA sense sequence
  source 1..19: mol_type = other RNA
accagtgtgagctgacttc

SEQ ID NO: 68581 - RNA, 19 nt, synthetic construct
  misc_feature 1..19: note = siRNA antisense sequence
  source 1..19: mol_type = other RNA
gaagtcagctcacactggt

SEQ ID NO: 68582 - RNA, 19 nt, synthetic construct
  misc_feature 1..19: note = siRNA sense sequence
  source 1..19: mol_type = other RNA
ccagtgtgagctgacttca

SEQ ID NO: 68583 - RNA, 19 nt, synthetic construct
  misc_feature 1..19: note = siRNA antisense sequence
  source 1..19: mol_type = other RNA
tgaagtcagctcacactgg

SEQ ID NO: 68584 - RNA, 19 nt, synthetic construct
  misc_feature 1..19: note = siRNA sense sequence
  source 1..19: mol_type = other RNA
cagtgtgagctgacttcag

SEQ ID NO: 68585 - RNA, 19 nt, synthetic construct
  misc_feature 1..19: note = siRNA antisense sequence
  source 1..19: mol_type = other RNA
ctgaagtcagctcacactg

SEQ ID NO: 68586 - RNA, 19 nt, synthetic construct
  misc_feature 1..19: note = siRNA sense sequence
  source 1..19: mol_type = other RNA
agacagattacacgataga

SEQ ID NO: 68587 - RNA, 19 nt, synthetic construct
  misc_feature 1..19: note = siRNA antisense sequence
  source 1..19: mol_type = other RNA
tctatcgtgtaatctgtct

SEQ ID NO: 68588 - RNA, 19 nt, synthetic construct
  misc_feature 1..19: note = siRNA sense sequence
  source 1..19: mol_type = other RNA
gacagattacacgatagac

SEQ ID NO: 68589 - RNA, 19 nt, synthetic construct
  misc_feature 1..19: note = siRNA antisense sequence
  source 1..19: mol_type = other RNA
gtctatcgtgtaatctgtc

SEQ ID NO: 68590 - RNA, 19 nt, synthetic construct
  misc_feature 1..19: note = siRNA sense sequence
  source 1..19: mol_type = other RNA
acagattacacgatagaca

SEQ ID NO: 68591 - RNA, 19 nt, synthetic construct
  misc_feature 1..19: note = siRNA antisense sequence
  source 1..19: mol_type = other RNA
tgtctatcgtgtaatctgt

SEQ ID NO: 68592 - RNA, 19 nt, synthetic construct
  misc_feature 1..19: note = siRNA sense sequence
  source 1..19: mol_type = other RNA
cagattacacgatagacag

SEQ ID NO: 68593 - RNA, 19 nt, synthetic construct
  misc_feature 1..19: note = siRNA antisense sequence
  source 1..19: mol_type = other RNA
ctgtctatcgtgtaatctg

SEQ ID NO: 68594 - RNA, 19 nt, synthetic construct
  misc_feature 1..19: note = siRNA sense sequence
  source 1..19: mol_type = other RNA
agattacacgatagacaga

SEQ ID NO: 68595 - RNA, 19 nt, synthetic construct
  misc_feature 1..19: note = siRNA antisense sequence
  source 1..19: mol_type = other RNA
tctgtctatcgtgtaatct

SEQ ID NO: 68596 - RNA, 19 nt, synthetic construct
  misc_feature 1..19: note = siRNA sense sequence
  source 1..19: mol_type = other RNA
gattacacgatagacagat

SEQ ID NO: 68597 - RNA, 19 nt, synthetic construct
  misc_feature 1..19: note = siRNA antisense sequence
  source 1..19: mol_type = other RNA
atctgtctatcgtgtaatc

SEQ ID NO: 68598 - RNA, 19 nt, synthetic construct
  misc_feature 1..19: note = siRNA sense sequence
  source 1..19: mol_type = other RNA
attacacgatagacagata

SEQ ID NO: 68599 - RNA, 19 nt, synthetic construct
  misc_feature 1..19: note = siRNA antisense sequence
  source 1..19: mol_type = other RNA
tatctgtctatcgtgtaat

SEQ ID NO: 68600 - RNA, 19 nt, synthetic construct
  misc_feature 1..19: note = siRNA sense sequence
  source 1..19: mol_type = other RNA
ttacacgatagacagatag

SEQ ID NO: 68601 - RNA, 19 nt, synthetic construct
  misc_feature 1..19: note = siRNA antisense sequence
  source 1..19: mol_type = other RNA
ctatctgtctatcgtgtaa

SEQ ID NO: 68602 - RNA, 19 nt, synthetic construct
  misc_feature 1..19: note = siRNA sense sequence
  source 1..19: mol_type = other RNA
tacacgatagacagataga

SEQ ID NO: 68603 - RNA, 19 nt, synthetic construct
  misc_feature 1..19: note = siRNA antisense sequence
  source 1..19: mol_type = other RNA
tctatctgtctatcgtgta

SEQ ID NO: 68604 - RNA, 19 nt, synthetic construct
  misc_feature 1..19: note = siRNA sense sequence
  source 1..19: mol_type = other RNA
cacgatagacagatagata

SEQ ID NO: 68605 - RNA, 19 nt, synthetic construct
  misc_feature 1..19: note = siRNA antisense sequence
  source 1..19: mol_type = other RNA
tatctatctgtctatcgtg

SEQ ID NO: 68606 - RNA, 19 nt, synthetic construct
  misc_feature 1..19: note = siRNA sense sequence
  source 1..19: mol_type = other RNA
tagacagatagatagatag

SEQ ID NO: 68607 - RNA, 19 nt, synthetic construct
  misc_feature 1..19: note = siRNA antisense sequence
  source 1..19: mol_type = other RNA
ctatctatctatctgtcta

SEQ ID NO: 68608 - RNA, 19 nt, synthetic construct
  misc_feature 1..19: note = siRNA sense sequence
  source 1..19: mol_type = other RNA
agacagatagatagataga

SEQ ID NO: 68609 - RNA, 19 nt, synthetic construct
  misc_feature 1..19: note = siRNA antisense sequence
  source 1..19: mol_type = other RNA
tctatctatctatctgtct

SEQ ID NO: 68610 - RNA, 19 nt, synthetic construct
  misc_feature 1..19: note = siRNA sense sequence
  source 1..19: mol_type = other RNA
gacagatagatagatagat

SEQ ID NO: 68611 - RNA, 19 nt, synthetic construct
  misc_feature 1..19: note = siRNA antisense sequence
  source 1..19: mol_type = other RNA
atctatctatctatctgtc

SEQ ID NO: 68612 - RNA, 19 nt, synthetic construct
  misc_feature 1..19: note = siRNA sense sequence
  source 1..19: mol_type = other RNA
cagatagatagatagatag

SEQ ID NO: 68613 - RNA, 19 nt, synthetic construct
  misc_feature 1..19: note = siRNA antisense sequence
  source 1..19: mol_type = other RNA
ctatctatctatctatctg

SEQ ID NO: 68614 - RNA, 19 nt, synthetic construct
  misc_feature 1..19: note = siRNA sense sequence
  source 1..19: mol_type = other RNA
aattatgccaaaagtactg

SEQ ID NO: 68615 - RNA, 19 nt, synthetic construct
  misc_feature 1..19: note = siRNA antisense sequence
  source 1..19: mol_type = other RNA
cagtacttttggcataatt

SEQ ID NO: 68616 - RNA, 19 nt, synthetic construct
  misc_feature 1..19: note = siRNA sense sequence
  source 1..19: mol_type = other RNA
attatgccaaaagtactga

SEQ ID NO: 68617 - RNA, 19 nt, synthetic construct
  misc_feature 1..19: note = siRNA antisense sequence
  source 1..19: mol_type = other RNA
tcagtacttttggcataat

SEQ ID NO: 68618 - RNA, 19 nt, synthetic construct
  misc_feature 1..19: note = siRNA sense sequence
  source 1..19: mol_type = other RNA
ttatgccaaaagtactgat

SEQ ID NO: 68619 - RNA, 19 nt, synthetic construct
  misc_feature 1..19: note = siRNA antisense sequence
  source 1..19: mol_type = other RNA
atcagtacttttggcataa

SEQ ID NO: 68620 - RNA, 19 nt, synthetic construct
  misc_feature 1..19: note = siRNA sense sequence
  source 1..19: mol_type = other RNA
tatgccaaaagtactgatt

SEQ ID NO: 68621 - RNA, 19 nt, synthetic construct
  misc_feature 1..19: note = siRNA antisense sequence
  source 1..19: mol_type = other RNA
aatcagtacttttggcata

SEQ ID NO: 68622 - RNA, 19 nt, synthetic construct
  misc_feature 1..19: note = siRNA sense sequence
  source 1..19: mol_type = other RNA
atgccaaaagtactgatta

SEQ ID NO: 68623 - RNA, 19 nt, synthetic construct
  misc_feature 1..19: note = siRNA antisense sequence
  source 1..19: mol_type = other RNA
taatcagtacttttggcat

SEQ ID NO: 68624 - RNA, 19 nt, synthetic construct
  misc_feature 1..19: note = siRNA sense sequence
  source 1..19: mol_type = other RNA
tgccaaaagtactgattat

SEQ ID NO: 68625 - RNA, 19 nt, synthetic construct
  misc_feature 1..19: note = siRNA antisense sequence
  source 1..19: mol_type = other RNA
ataatcagtacttttggca

SEQ ID NO: 68626 - RNA, 19 nt, synthetic construct
  misc_feature 1..19: note = siRNA sense sequence
  source 1..19: mol_type = other RNA
gattatatcaagcccagta

SEQ ID NO: 68627 - RNA, 19 nt, synthetic construct
  misc_feature 1..19: note = siRNA antisense sequence
  source 1..19: mol_type = other RNA
tactgggcttgatataatc

SEQ ID NO: 68628 - RNA, 19 nt, synthetic construct
  misc_feature 1..19: note = siRNA sense sequence
  source 1..19: mol_type = other RNA
attatatcaagcccagtaa

SEQ ID NO: 68629 - RNA, 19 nt, synthetic construct
  misc_feature 1..19: note = siRNA antisense sequence
  source 1..19: mol_type = other RNA
ttactgggcttgatataat

SEQ ID NO: 68630 - RNA, 19 nt, synthetic construct
  misc_feature 1..19: note = siRNA sense sequence
  source 1..19: mol_type = other RNA
ttatatcaagcccagtaaa

SEQ ID NO: 68631 - RNA, 19 nt, synthetic construct
  misc_feature 1..19: note = siRNA antisense sequence
  source 1..19: mol_type = other RNA
tttactgggcttgatataa

SEQ ID NO: 68632 - RNA, 19 nt, synthetic construct
  misc_feature 1..19: note = siRNA sense sequence
  source 1..19: mol_type = other RNA
acagcacccattctttaat

SEQ ID NO: 68633 - RNA, 19 nt, synthetic construct
  misc_feature 1..19: note = siRNA antisense sequence
  source 1..19: mol_type = other RNA
attaaagaatgggtgctgt

SEQ ID NO: 68634 - RNA, 19 nt, synthetic construct
  misc_feature 1..19: note = siRNA sense sequence
  source 1..19: mol_type = other RNA
cagcacccattctttaatt

SEQ ID NO: 68635 - RNA, 19 nt, synthetic construct
  misc_feature 1..19: note = siRNA antisense sequence
  source 1..19: mol_type = other RNA
aattaaagaatgggtgctg

SEQ ID NO: 68636 - RNA, 19 nt, synthetic construct
  misc_feature 1..19: note = siRNA sense sequence
  source 1..19: mol_type = other RNA
agcacccattctttaattt

SEQ ID NO: 68637 - RNA, 19 nt, synthetic construct
  misc_feature 1..19: note = siRNA antisense sequence
  source 1..19: mol_type = other RNA
aaattaaagaatgggtgct

SEQ ID NO: 68638 - RNA, 19 nt, synthetic construct
  misc_feature 1..19: note = siRNA sense sequence
  source 1..19: mol_type = other RNA
gcacccattctttaatttt

SEQ ID NO: 68639 - RNA, 19 nt, synthetic construct
  misc_feature 1..19: note = siRNA antisense sequence
  source 1..19: mol_type = other RNA
aaaattaaagaatgggtgc

SEQ ID NO: 68640 - RNA, 19 nt, synthetic construct
  misc_feature 1..19: note = siRNA sense sequence
  source 1..19: mol_type = other RNA
cacccattctttaattttg

SEQ ID NO: 68641 - RNA, 19 nt, synthetic construct
  misc_feature 1..19: note = siRNA antisense sequence
  source 1..19: mol_type = other RNA
caaaattaaagaatgggtg

SEQ ID NO: 68642 - RNA, 19 nt, synthetic construct
  misc_feature 1..19: note = siRNA sense sequence
  source 1..19: mol_type = other RNA
attgtctcattttcccaag

SEQ ID NO: 68643 - RNA, 19 nt, synthetic construct
  misc_feature 1..19: note = siRNA antisense sequence
  source 1..19: mol_type = other RNA
cttgggaaaatgagacaat

SEQ ID NO: 68644 - RNA, 19 nt, synthetic construct
  misc_feature 1..19: note = siRNA sense sequence
  source 1..19: mol_type = other RNA
cccaaggaattcaaagtcc

SEQ ID NO: 68645 - RNA, 19 nt, synthetic construct
  misc_feature 1..19: note = siRNA antisense sequence
  source 1..19: mol_type = other RNA
ggactttgaattccttggg

SEQ ID NO: 68646 - RNA, 19 nt, synthetic construct
  misc_feature 1..19: note = siRNA sense sequence
  source 1..19: mol_type = other RNA
attcaaagtcctgtgatac

SEQ ID NO: 68647 - RNA, 19 nt, synthetic construct
  misc_feature 1..19: note = siRNA antisense sequence
  source 1..19: mol_type = other RNA
gtatcacaggactttgaat

SEQ ID NO: 68648 - RNA, 19 nt, synthetic construct
  misc_feature 1..19: note = siRNA sense sequence
  source 1..19: mol_type = other RNA
ttcaaagtcctgtgataca

SEQ ID NO: 68649 - RNA, 19 nt, synthetic construct
  misc_feature 1..19: note = siRNA antisense sequence
  source 1..19: mol_type = other RNA
tgtatcacaggactttgaa

SEQ ID NO: 68650 - RNA, 19 nt, synthetic construct
  misc_feature 1..19: note = siRNA sense sequence
  source 1..19: mol_type = other RNA
ctatgatccaatttcaact

SEQ ID NO: 68651 - RNA, 19 nt, synthetic construct
  misc_feature 1..19: note = siRNA antisense sequence
  source 1..19: mol_type = other RNA
agttgaaattggatcatag

SEQ ID NO: 68652 - RNA, 19 nt, synthetic construct
  misc_feature 1..19: note = siRNA sense sequence
  source 1..19: mol_type = other RNA
gatccaatttcaacttcat

SEQ ID NO: 68653 - RNA, 19 nt, synthetic construct
  misc_feature 1..19: note = siRNA antisense sequence
  source 1..19: mol_type = other RNA
atgaagttgaaattggatc

SEQ ID NO: 68654 - RNA, 19 nt, synthetic construct
  misc_feature 1..19: note = siRNA sense sequence
  source 1..19: mol_type = other RNA
aatttcaacttcattggtc

SEQ ID NO: 68655 - RNA, 19 nt, synthetic construct
  misc_feature 1..19: note = siRNA antisense sequence
  source 1..19: mol_type = other RNA
gaccaatgaagttgaaatt

SEQ ID NO: 68656 - RNA, 19 nt, synthetic construct
  misc_feature 1..19: note = siRNA sense sequence
  source 1..19: mol_type = other RNA
atttcaacttcattggtcc

SEQ ID NO: 68657 - RNA, 19 nt, synthetic construct
  misc_feature 1..19: note = siRNA antisense sequence
  source 1..19: mol_type = other RNA
ggaccaatgaagttgaaat

SEQ ID NO: 68658 - RNA, 19 nt, synthetic construct
  misc_feature 1..19: note = siRNA sense sequence
  source 1..19: mol_type = other RNA
tttcaacttcattggtcca

SEQ ID NO: 68659 - RNA, 19 nt, synthetic construct
  misc_feature 1..19: note = siRNA antisense sequence
  source 1..19: mol_type = other RNA
tggaccaatgaagttgaaa

SEQ ID NO: 68660 - RNA, 19 nt, synthetic construct
  misc_feature 1..19: note = siRNA sense sequence
  source 1..19: mol_type = other RNA
ttcaacttcattggtccaa

SEQ ID NO: 68661 - RNA, 19 nt, synthetic construct
  misc_feature 1..19: note = siRNA antisense sequence
  source 1..19: mol_type = other RNA
ttggaccaatgaagttgaa

SEQ ID NO: 68662 - RNA, 19 nt, synthetic construct
  misc_feature 1..19: note = siRNA sense sequence
  source 1..19: mol_type = other RNA
aactattttcctctgagca

SEQ ID NO: 68663 - RNA, 19 nt, synthetic construct
  misc_feature 1..19: note = siRNA antisense sequence
  source 1..19: mol_type = other RNA
tgctcagaggaaaatagtt

SEQ ID NO: 68664 - RNA, 19 nt, synthetic construct
  misc_feature 1..19: note = siRNA sense sequence
  source 1..19: mol_type = other RNA
actattttcctctgagcac

SEQ ID NO: 68665 - RNA, 19 nt, synthetic construct
  misc_feature 1..19: note = siRNA antisense sequence
  source 1..19: mol_type = other RNA
gtgctcagaggaaaatagt

SEQ ID NO: 68666 - RNA, 19 nt, synthetic construct
  misc_feature 1..19: note = siRNA sense sequence
  source 1..19: mol_type = other RNA
ttttcctctgagcactaga

SEQ ID NO: 68667 - RNA, 19 nt, synthetic construct
  misc_feature 1..19: note = siRNA antisense sequence
  source 1..19: mol_type = other RNA
tctagtgctcagaggaaaa

SEQ ID NO: 68668 - RNA, 19 nt, synthetic construct
  misc_feature 1..19: note = siRNA sense sequence
  source 1..19: mol_type = other RNA
ttcctctgagcactagatt

SEQ ID NO: 68669 - RNA, 19 nt, synthetic construct
  misc_feature 1..19: note = siRNA antisense sequence
  source 1..19: mol_type = other RNA
aatctagtgctcagaggaa

SEQ ID NO: 68670 - RNA, 19 nt, synthetic construct
  misc_feature 1..19: note = siRNA sense sequence
  source 1..19: mol_type = other RNA
ctctgagcactagattcat

SEQ ID NO: 68671 - RNA, 19 nt, synthetic construct
  misc_feature 1..19: note = siRNA antisense sequence
  source 1..19: mol_type = other RNA
atgaatctagtgctcagag

SEQ ID NO: 68672 - RNA, 19 nt, synthetic construct
  misc_feature 1..19: note = siRNA sense sequence
  source 1..19: mol_type = other RNA
tctgagcactagattcatg

SEQ ID NO: 68673 - RNA, 19 nt, synthetic construct
  misc_feature 1..19: note = siRNA antisense sequence
  source 1..19: mol_type = other RNA
catgaatctagtgctcaga

SEQ ID NO: 68674 - RNA, 19 nt, synthetic construct
  misc_feature 1..19: note = siRNA sense sequence
  source 1..19: mol_type = other RNA
ctgagcactagattcatgg

SEQ ID NO: 68675 - RNA, 19 nt, synthetic construct
  misc_feature 1..19: note = siRNA antisense sequence
  source 1..19: mol_type = other RNA
ccatgaatctagtgctcag

SEQ ID NO: 68676 - RNA, 19 nt, synthetic construct
  misc_feature 1..19: note = siRNA sense sequence
  source 1..19: mol_type = other RNA
tgagcactagattcatggg

SEQ ID NO: 68677 - RNA, 19 nt, synthetic construct
  misc_feature 1..19: note = siRNA antisense sequence
  source 1..19: mol_type = other RNA
cccatgaatctagtgctca

SEQ ID NO: 68678 - RNA, 19 nt, synthetic construct
  misc_feature 1..19: note = siRNA sense sequence
  source 1..19: mol_type = other RNA
gagcactagattcatgggc

SEQ ID NO: 68679 - RNA, 19 nt, synthetic construct
  misc_feature 1..19: note = siRNA antisense sequence
  source 1..19: mol_type = other RNA
gcccatgaatctagtgctc

SEQ ID NO: 68680 - RNA, 19 nt, synthetic construct
  misc_feature 1..19: note = siRNA sense sequence
  source 1..19: mol_type = other RNA
agcactagattcatgggca

SEQ ID NO: 68681 - RNA, 19 nt, synthetic construct
  misc_feature 1..19: note = siRNA antisense sequence
  source 1..19: mol_type = other RNA
tgcccatgaatctagtgct

SEQ ID NO: 68682 - RNA, 19 nt, synthetic construct
  misc_feature 1..19: note = siRNA sense sequence
  source 1..19: mol_type = other RNA
gcactagattcatgggcaa

SEQ ID NO: 68683 - RNA, 19 nt, synthetic construct
  misc_feature 1..19: note = siRNA antisense sequence
  source 1..19: mol_type = other RNA
ttgcccatgaatctagtgc

SEQ ID NO: 68684 - RNA, 19 nt, synthetic construct
  misc_feature 1..19: note = siRNA sense sequence
  source 1..19: mol_type = other RNA
cactagattcatgggcaat

SEQ ID NO: 68685 - RNA, 19 nt, synthetic construct
  misc_feature 1..19: note = siRNA antisense sequence
  source 1..19: mol_type = other RNA
attgcccatgaatctagtg

SEQ ID NO: 68686 - RNA, 19 nt, synthetic construct
  misc_feature 1..19: note = siRNA sense sequence
  source 1..19: mol_type = other RNA
actagattcatgggcaatt

SEQ ID NO: 68687 - RNA, 19 nt, synthetic construct
  misc_feature 1..19: note = siRNA antisense sequence
  source 1..19: mol_type = other RNA
aattgcccatgaatctagt

SEQ ID NO: 68688 - RNA, 19 nt, synthetic construct
  misc_feature 1..19: note = siRNA sense sequence
  source 1..19: mol_type = other RNA
ctagattcatgggcaattt

SEQ ID NO: 68689 - RNA, 19 nt, synthetic construct
  misc_feature 1..19: note = siRNA antisense sequence
  source 1..19: mol_type = other RNA
aaattgcccatgaatctag

SEQ ID NO: 68690 - RNA, 19 nt, synthetic construct
  misc_feature 1..19: note = siRNA sense sequence
  source 1..19: mol_type = other RNA
tagattcatgggcaattta

SEQ ID NO: 68691 - RNA, 19 nt, synthetic construct
  misc_feature 1..19: note = siRNA antisense sequence
  source 1..19: mol_type = other RNA
taaattgcccatgaatcta

SEQ ID NO: 68692 - RNA, 19 nt, synthetic construct
  misc_feature 1..19: note = siRNA sense sequence
  source 1..19: mol_type = other RNA
agattcatgggcaatttaa

SEQ ID NO: 68693 - RNA, 19 nt, synthetic construct
  misc_feature 1..19: note = siRNA antisense sequence
  source 1..19: mol_type = other RNA
ttaaattgcccatgaatct

SEQ ID NO: 68694 - RNA, 19 nt, synthetic construct
  misc_feature 1..19: note = siRNA sense sequence
  source 1..19: mol_type = other RNA
gattcatgggcaatttaat

SEQ ID NO: 68695 - RNA, 19 nt, synthetic construct
  misc_feature 1..19: note = siRNA antisense sequence
  source 1..19: mol_type = other RNA
attaaattgcccatgaatc

SEQ ID NO: 68696 - RNA, 19 nt, synthetic construct
  misc_feature 1..19: note = siRNA sense sequence
  source 1..19: mol_type = other RNA
attcatgggcaatttaatc

SEQ ID NO: 68697 - RNA, 19 nt, synthetic construct
  misc_feature 1..19: note = siRNA antisense sequence
  source 1..19: mol_type = other RNA
gattaaattgcccatgaat

SEQ ID NO: 68698 - RNA, 19 nt, synthetic construct
  misc_feature 1..19: note = siRNA sense sequence
  source 1..19: mol_type = other RNA
ttcatgggcaatttaatct

SEQ ID NO: 68699 - RNA, 19 nt, synthetic construct
  misc_feature 1..19: note = siRNA antisense sequence
  source 1..19: mol_type = other RNA
agattaaattgcccatgaa

SEQ ID NO: 68700 - RNA, 19 nt, synthetic construct
  misc_feature 1..19: note = siRNA sense sequence
  source 1..19: mol_type = other RNA
tcatgggcaatttaatctc

SEQ ID NO: 68701 - RNA, 19 nt, synthetic construct
  misc_feature 1..19: note = siRNA antisense sequence
  source 1..19: mol_type = other RNA
gagattaaattgcccatga

SEQ ID NO: 68702 - RNA, 19 nt, synthetic construct
  misc_feature 1..19: note = siRNA sense sequence
  source 1..19: mol_type = other RNA
atgggcaatttaatctctg

SEQ ID NO: 68703 - RNA, 19 nt, synthetic construct
  misc_feature 1..19: note = siRNA antisense sequence
  source 1..19: mol_type = other RNA
cagagattaaattgcccat

SEQ ID NO: 68704 - RNA, 19 nt, synthetic construct
  misc_feature 1..19: note = siRNA sense sequence
  source 1..19: mol_type = other RNA
tgggcaatttaatctctga

SEQ ID NO: 68705 - RNA, 19 nt, synthetic construct
  misc_feature 1..19: note = siRNA antisense sequence
  source 1..19: mol_type = other RNA
tcagagattaaattgccca

SEQ ID NO: 68706 - RNA, 19 nt, synthetic construct
  misc_feature 1..19: note = siRNA sense sequence
  source 1..19: mol_type = other RNA
gggcaatttaatctctgaa

SEQ ID NO: 68707 - RNA, 19 nt, synthetic construct
  misc_feature 1..19: note = siRNA antisense sequence
  source 1..19: mol_type = other RNA
ttcagagattaaattgccc

SEQ ID NO: 68708 - RNA, 19 nt, synthetic construct
  misc_feature 1..19: note = siRNA sense sequence
  source 1..19: mol_type = other RNA
aaaagaggcttgtagtaaa

SEQ ID NO: 68709 - RNA, 19 nt, synthetic construct
  misc_feature 1..19: note = siRNA antisense sequence
  source 1..19: mol_type = other RNA
tttactacaagcctctttt

SEQ ID NO: 68710 - RNA, 19 nt, synthetic construct
  misc_feature 1..19: note = siRNA sense sequence
  source 1..19: mol_type = other RNA
caaaatttgatgcttctgc

SEQ ID NO: 68711 - RNA, 19 nt, synthetic construct
  misc_feature 1..19: note = siRNA antisense sequence
  source 1..19: mol_type = other RNA
gcagaagcatcaaattttg

SEQ ID NO: 68712 - RNA, 19 nt, synthetic construct
  misc_feature 1..19: note = siRNA sense sequence
  source 1..19: mol_type = other RNA
aaaatttgatgcttctgca

SEQ ID NO: 68713 - RNA, 19 nt, synthetic construct
  misc_feature 1..19: note = siRNA antisense sequence
  source 1..19: mol_type = other RNA
tgcagaagcatcaaatttt

SEQ ID NO: 68714 - RNA, 19 nt, synthetic construct
  misc_feature 1..19: note = siRNA sense sequence
  source 1..19: mol_type = other RNA
aaatttgatgcttctgcaa

SEQ ID NO: 68715 - RNA, 19 nt, synthetic construct
  misc_feature 1..19: note = siRNA antisense sequence
  source 1..19: mol_type = other RNA
ttgcagaagcatcaaattt

SEQ ID NO: 68716 - RNA, 19 nt, synthetic construct
  misc_feature 1..19: note = siRNA sense sequence
  source 1..19: mol_type = other RNA
aatttgatgcttctgcaac

SEQ ID NO: 68717 - RNA, 19 nt, synthetic construct
  misc_feature 1..19: note = siRNA antisense sequence
  source 1..19: mol_type = other RNA
gttgcagaagcatcaaatt

SEQ ID NO: 68718 - RNA, 19 nt, synthetic construct
  misc_feature 1..19: note = siRNA sense sequence
  source 1..19: mol_type = other RNA
atttgatgcttctgcaacc

SEQ ID NO: 68719 - RNA, 19 nt, synthetic construct
  misc_feature 1..19: note = siRNA antisense sequence
  source 1..19: mol_type = other RNA
ggttgcagaagcatcaaat

SEQ ID NO: 68720 - RNA, 19 nt, synthetic construct
  misc_feature 1..19: note = siRNA sense sequence
  source 1..19: mol_type = other RNA
tttgatgcttctgcaacca

SEQ ID NO: 68721 - RNA, 19 nt, synthetic construct
  misc_feature 1..19: note = siRNA antisense sequence
  source 1..19: mol_type = other RNA
tggttgcagaagcatcaaa

SEQ ID NO: 68722 - RNA, 19 nt, synthetic construct
  misc_feature 1..19: note = siRNA sense sequence
  source 1..19: mol_type = other RNA
tgcttctgcaaccataata

SEQ ID NO: 68723 - RNA, 19 nt, synthetic construct
  misc_feature 1..19: note = siRNA antisense sequence
  source 1..19: mol_type = other RNA
tattatggttgcagaagca

SEQ ID NO: 68724 - RNA, 19 nt, synthetic construct
  misc_feature 1..19: note = siRNA sense sequence
  source 1..19: mol_type = other RNA
gcttctgcaaccataataa

SEQ ID NO: 68725 - RNA, 19 nt, synthetic construct
  misc_feature 1..19: note = siRNA antisense sequence
  source 1..19: mol_type = other RNA
ttattatggttgcagaagc

SEQ ID NO: 68726 - RNA, 19 nt, synthetic construct
  misc_feature 1..19: note = siRNA sense sequence
  source 1..19: mol_type = other RNA
acactcacatgcagatatt

SEQ ID NO: 68727 - RNA, 19 nt, synthetic construct
  misc_feature 1..19: note = siRNA antisense sequence
  source 1..19: mol_type = other RNA
aatatctgcatgtgagtgt

SEQ ID NO: 68728 - RNA, 19 nt, synthetic construct
  misc_feature 1..19: note = siRNA sense sequence
  source 1..19: mol_type = other RNA
cactcacatgcagatattt

SEQ ID NO: 68729 - RNA, 19 nt, synthetic construct
  misc_feature 1..19: note = siRNA antisense sequence
  source 1..19: mol_type = other RNA
aaatatctgcatgtgagtg

SEQ ID NO: 68730 - RNA, 19 nt, synthetic construct
  misc_feature 1..19: note = siRNA sense sequence
  source 1..19: mol_type = other RNA
actcacatgcagatattta

SEQ ID NO: 68731 - RNA, 19 nt, synthetic construct
  misc_feature 1..19: note = siRNA antisense sequence
  source 1..19: mol_type = other RNA
taaatatctgcatgtgagt

SEQ ID NO: 68732 - RNA, 19 nt, synthetic construct
  misc_feature 1..19: note = siRNA sense sequence
  source 1..19: mol_type = other RNA
ctcacatgcagatatttac

SEQ ID NO: 68733 - RNA, 19 nt, synthetic construct
  misc_feature 1..19: note = siRNA antisense sequence
  source 1..19: mol_type = other RNA
gtaaatatctgcatgtgag

SEQ ID NO: 68734 - RNA, 19 nt, synthetic construct
  misc_feature 1..19: note = siRNA sense sequence
  source 1..19: mol_type = other RNA
ataaaatcaaagtctaggc

SEQ ID NO: 68735 - RNA, 19 nt, synthetic construct
  misc_feature 1..19: note = siRNA antisense sequence
  source 1..19: mol_type = other RNA
gcctagactttgattttat

SEQ ID NO: 68736 - RNA, 19 nt, synthetic construct
  misc_feature 1..19: note = siRNA sense sequence
  source 1..19: mol_type = other RNA
aaaatcaaagtctaggctc

SEQ ID NO: 68737 - RNA, 19 nt, synthetic construct
  misc_feature 1..19: note = siRNA antisense sequence
  source 1..19: mol_type = other RNA
gagcctagactttgatttt

SEQ ID NO: 68738 - RNA, 19 nt, synthetic construct
  misc_feature 1..19: note = siRNA sense sequence
  source 1..19: mol_type = other RNA
aaatcaaagtctaggctca

SEQ ID NO: 68739 - RNA, 19 nt, synthetic construct
  misc_feature 1..19: note = siRNA antisense sequence
  source 1..19: mol_type = other RNA
tgagcctagactttgattt

SEQ ID NO: 68740 - RNA, 19 nt, synthetic construct
  misc_feature 1..19: note = siRNA sense sequence
  source 1..19: mol_type = other RNA
aatcaaagtctaggctcaa

SEQ ID NO: 68741 - RNA, 19 nt, synthetic construct
  misc_feature 1..19: note = siRNA antisense sequence
  source 1..19: mol_type = other RNA
ttgagcctagactttgatt

SEQ ID NO: 68742 - RNA, 19 nt, synthetic construct
  misc_feature 1..19: note = siRNA sense sequence
  source 1..19: mol_type = other RNA
atcaaagtctaggctcaat

SEQ ID NO: 68743 - RNA, 19 nt, synthetic construct
  misc_feature 1..19: note = siRNA antisense sequence
  source 1..19: mol_type = other RNA
attgagcctagactttgat

SEQ ID NO: 68744 - RNA, 19 nt, synthetic construct
  misc_feature 1..19: note = siRNA sense sequence
  source 1..19: mol_type = other RNA
caaagtctaggctcaattg

SEQ ID NO: 68745 - RNA, 19 nt, synthetic construct
  misc_feature 1..19: note = siRNA antisense sequence
  source 1..19: mol_type = other RNA
caattgagcctagactttg

SEQ ID NO: 68746 - RNA, 19 nt, synthetic construct
  misc_feature 1..19: note = siRNA sense sequence
  source 1..19: mol_type = other RNA
aaagtctaggctcaattgg

SEQ ID NO: 68747 - RNA, 19 nt, synthetic construct
  misc_feature 1..19: note = siRNA antisense sequence
  source 1..19: mol_type = other RNA
ccaattgagcctagacttt

SEQ ID NO: 68748 - RNA, 19 nt, synthetic construct
  misc_feature 1..19: note = siRNA sense sequence
  source 1..19: mol_type = other RNA
aagtctaggctcaattgga

SEQ ID NO: 68749 - RNA, 19 nt, synthetic construct
  misc_feature 1..19: note = siRNA antisense sequence
  source 1..19: mol_type = other RNA
tccaattgagcctagactt

SEQ ID NO: 68750 - RNA, 19 nt, synthetic construct
  misc_feature 1..19: note = siRNA sense sequence
  source 1..19: mol_type = other RNA
agtctaggctcaattggaa

SEQ ID NO: 68751 - RNA, 19 nt, synthetic construct
  misc_feature 1..19: note = siRNA antisense sequence
  source 1..19: mol_type = other RNA
ttccaattgagcctagact

SEQ ID NO: 68752 - RNA, 19 nt, synthetic construct
  misc_feature 1..19: note = siRNA sense sequence
  source 1..19: mol_type = other RNA
agtgccattgttgtgatca

SEQ ID NO: 68753 - RNA, 19 nt, synthetic construct
  misc_feature 1..19: note = siRNA antisense sequence
  source 1..19: mol_type = other RNA
tgatcacaacaatggcact

SEQ ID NO: 68754 - RNA, 19 nt, synthetic construct
  misc_feature 1..19: note = siRNA sense sequence
  source 1..19: mol_type = other RNA
gtgccattgttgtgatcaa

SEQ ID NO: 68755 - RNA, 19 nt, synthetic construct
  misc_feature 1..19: note = siRNA antisense sequence
  source 1..19: mol_type = other RNA
ttgatcacaacaatggcac

SEQ ID NO: 68756 - RNA, 19 nt, synthetic construct
  misc_feature 1..19: note = siRNA sense sequence
  source 1..19: mol_type = other RNA
ttgtgatcaatggagtaaa

SEQ ID NO: 68757 - RNA, 19 nt, synthetic construct
  misc_feature 1..19: note = siRNA antisense sequence
  source 1..19: mol_type = other RNA
tttactccattgatcacaa

SEQ ID NO: 68758 - RNA, 19 nt, synthetic construct
  misc_feature 1..19: note = siRNA sense sequence
  source 1..19: mol_type = other RNA
tgtgatcaatggagtaaag

SEQ ID NO: 68759 - RNA, 19 nt, synthetic construct
  misc_feature 1..19: note = siRNA antisense sequence
  source 1..19: mol_type = other RNA
ctttactccattgatcaca

SEQ ID NO: 68760 - RNA, 19 nt, synthetic construct
  misc_feature 1..19: note = siRNA sense sequence
  source 1..19: mol_type = other RNA
gtgatcaatggagtaaagc

SEQ ID NO: 68761 - RNA, 19 nt, synthetic construct
  misc_feature 1..19: note = siRNA antisense sequence
  source 1..19: mol_type = other RNA
gctttactccattgatcac

SEQ ID NO: 68762 - RNA, 19 nt, synthetic construct
  misc_feature 1..19: note = siRNA sense sequence
  source 1..19: mol_type = other RNA
tcaatggagtaaagctggg

SEQ ID NO: 68763 - RNA, 19 nt, synthetic construct
  misc_feature 1..19: note = siRNA antisense sequence
  source 1..19: mol_type = other RNA
cccagctttactccattga

SEQ ID NO: 68764 - RNA, 19 nt, synthetic construct
  misc_feature 1..19: note = siRNA sense sequence
  source 1..19: mol_type = other RNA
gggtatagtagaggctggg

SEQ ID NO: 68765 - RNA, 19 nt, synthetic construct
  misc_feature 1..19: note = siRNA antisense sequence
  source 1..19: mol_type = other RNA
cccagcctctactataccc

SEQ ID NO: 68766 - RNA, 19 nt, synthetic construct
  misc_feature 1..19: note = siRNA sense sequence
  source 1..19: mol_type = other RNA
tgcccatgttctctccaag

SEQ ID NO: 68767 - RNA, 19 nt, synthetic construct
  misc_feature 1..19: note = siRNA antisense sequence
  source 1..19: mol_type = other RNA
cttggagagaacatgggca

SEQ ID NO: 68768 - RNA, 19 nt, synthetic construct
  misc_feature 1..19: note = siRNA sense sequence
  source 1..19: mol_type = other RNA
atgttctctccaaggccac

SEQ ID NO: 68769 - RNA, 19 nt, synthetic construct
  misc_feature 1..19: note = siRNA antisense sequence
  source 1..19: mol_type = other RNA
gtggccttggagagaacat

SEQ ID NO: 68770 - RNA, 19 nt, synthetic construct
  misc_feature 1..19: note = siRNA sense sequence
  source 1..19: mol_type = other RNA
tgttctctccaaggccaca

SEQ ID NO: 68771 - RNA, 19 nt, synthetic construct
  misc_feature 1..19: note = siRNA antisense sequence
  source 1..19: mol_type = other RNA
tgtggccttggagagaaca

SEQ ID NO: 68772 - RNA, 19 nt, synthetic construct
  misc_feature 1..19: note = siRNA sense sequence
  source 1..19: mol_type = other RNA
acagcttgcacaccgtgaa

SEQ ID NO: 68773 - RNA, 19 nt, synthetic construct
  misc_feature 1..19: note = siRNA antisense sequence
  source 1..19: mol_type = other RNA
ttcacggtgtgcaagctgt

SEQ ID NO: 68774 - RNA, 19 nt, synthetic construct
  misc_feature 1..19: note = siRNA sense sequence
  source 1..19: mol_type = other RNA
cagcttgcacaccgtgaat

SEQ ID NO: 68775 - RNA, 19 nt, synthetic construct
  misc_feature 1..19: note = siRNA antisense sequence
  source 1..19: mol_type = other RNA
attcacggtgtgcaagctg

SEQ ID NO: 68776 - RNA, 19 nt, synthetic construct
  misc_feature 1..19: note = siRNA sense sequence
  source 1..19: mol_type = other RNA
agcttgcacaccgtgaatg

SEQ ID NO: 68777 - RNA, 19 nt, synthetic construct
  misc_feature 1..19: note = siRNA antisense sequence
  source 1..19: mol_type = other RNA
cattcacggtgtgcaagct

SEQ ID NO: 68778 - RNA, 19 nt, synthetic construct
  misc_feature 1..19: note = siRNA sense sequence
  source 1..19: mol_type = other RNA
gcttgcacaccgtgaatgg

SEQ ID NO: 68779 - RNA, 19 nt, synthetic construct
  misc_feature 1..19: note = siRNA antisense sequence
  source 1..19: mol_type = other RNA
ccattcacggtgtgcaagc

SEQ ID NO: 68780 - RNA, 19 nt, synthetic construct
  misc_feature 1..19: note = siRNA sense sequence
  source 1..19: mol_type = other RNA
cttgcacaccgtgaatggt

SEQ ID NO: 68781 - RNA, 19 nt, synthetic construct
  misc_feature 1..19: note = siRNA antisense sequence
  source 1..19: mol_type = other RNA
accattcacggtgtgcaag

SEQ ID NO: 68782 - RNA, 19 nt, synthetic construct
  misc_feature 1..19: note = siRNA sense sequence
  source 1..19: mol_type = other RNA
ggctccatggagtgtgcct

SEQ ID NO: 68783 - RNA, 19 nt, synthetic construct
  misc_feature 1..19: note = siRNA antisense sequence
  source 1..19: mol_type = other RNA
aggcacactccatggagcc

SEQ ID NO: 68784 - RNA, 19 nt, synthetic construct
  misc_feature 1..19: note = siRNA sense sequence
  source 1..19: mol_type = other RNA
ccatggagtgtgccttcac

SEQ ID NO: 68785 - RNA, 19 nt, synthetic construct
  misc_feature 1..19: note = siRNA antisense sequence
  source 1..19: mol_type = other RNA
gtgaaggcacactccatgg

SEQ ID NO: 68786 - RNA, 19 nt, synthetic construct
  misc_feature 1..19: note = siRNA sense sequence
  source 1..19: mol_type = other RNA
catggagtgtgccttcacg

SEQ ID NO: 68787 - RNA, 19 nt, synthetic construct
  misc_feature 1..19: note = siRNA antisense sequence
  source 1..19: mol_type = other RNA
cgtgaaggcacactccatg

SEQ ID NO: 68788 - RNA, 19 nt, synthetic construct
  misc_feature 1..19: note = siRNA sense sequence
  source 1..19: mol_type = other RNA
gggaatgtccttgtccaac

SEQ ID NO: 68789 - RNA, 19 nt, synthetic construct
  misc_feature 1..19: note = siRNA antisense sequence
  source 1..19: mol_type = other RNA
gttggacaaggacattccc

SEQ ID NO: 68790 - RNA, 19 nt, synthetic construct
  misc_feature 1..19: note = siRNA sense sequence
  source 1..19: mol_type = other RNA
tgtaatctactccatggga

SEQ ID NO: 68791 - RNA, 19 nt, synthetic construct
  misc_feature 1..19: note = siRNA antisense sequence
  source 1..19: mol_type = other RNA
tcccatggagtagattaca

SEQ ID NO: 68792 - RNA, 19 nt, synthetic construct
  misc_feature 1..19: note = siRNA sense sequence
  source 1..19: mol_type = other RNA
gtaatctactccatgggaa

SEQ ID NO: 68793 - RNA, 19 nt, synthetic construct
  misc_feature 1..19: note = siRNA antisense sequence
  source 1..19: mol_type = other RNA
ttcccatggagtagattac

SEQ ID NO: 68794 - RNA, 19 nt, synthetic construct
  misc_feature 1..19: note = siRNA sense sequence
  source 1..19: mol_type = other RNA
aactgactgtcctgctttt

SEQ ID NO: 68795 - RNA, 19 nt, synthetic construct
  misc_feature 1..19: note = siRNA antisense sequence
  source 1..19: mol_type = other RNA
aaaagcaggacagtcagtt

SEQ ID NO: 68796 - RNA, 19 nt, synthetic construct
  misc_feature 1..19: note = siRNA sense sequence
  source 1..19: mol_type = other RNA
actgactgtcctgcttttc

SEQ ID NO: 68797 - RNA, 19 nt, synthetic construct
  misc_feature 1..19: note = siRNA antisense sequence
  source 1..19: mol_type = other RNA
gaaaagcaggacagtcagt

SEQ ID NO: 68798 - RNA, 19 nt, synthetic construct
  misc_feature 1..19: note = siRNA sense sequence
  source 1..19: mol_type = other RNA
ggcccagagcctgtctcat

SEQ ID NO: 68799 - RNA, 19 nt, synthetic construct
  misc_feature 1..19: note = siRNA antisense sequence
  source 1..19: mol_type = other RNA
atgagacaggctctgggcc

SEQ ID NO: 68800 - RNA, 19 nt, synthetic construct
  misc_feature 1..19: note = siRNA sense sequence
  source 1..19: mol_type = other RNA
gcccagagcctgtctcatg

SEQ ID NO: 68801 - RNA, 19 nt, synthetic construct
  misc_feature 1..19: note = siRNA antisense sequence
  source 1..19: mol_type = other RNA
catgagacaggctctgggc

SEQ ID NO: 68802 - RNA, 19 nt, synthetic construct
  misc_feature 1..19: note = siRNA sense sequence
  source 1..19: mol_type = other RNA
cccagagcctgtctcatgt

SEQ ID NO: 68803 - RNA, 19 nt, synthetic construct
  misc_feature 1..19: note = siRNA antisense sequence
  source 1..19: mol_type = other RNA
acatgagacaggctctggg

SEQ ID NO: 68804 - RNA, 19 nt, synthetic construct
  misc_feature 1..19: note = siRNA sense sequence
  source 1..19: mol_type = other RNA
ccagagcctgtctcatgtg

SEQ ID NO: 68805 - RNA, 19 nt, synthetic construct
  misc_feature 1..19: note = siRNA antisense sequence
  source 1..19: mol_type = other RNA
cacatgagacaggctctgg

SEQ ID NO: 68806 - RNA, 19 nt, synthetic construct
  misc_feature 1..19: note = siRNA sense sequence
  source 1..19: mol_type = other RNA
cagagcctgtctcatgtgc

SEQ ID NO: 68807 - RNA, 19 nt, synthetic construct
  misc_feature 1..19: note = siRNA antisense sequence
  source 1..19: mol_type = other RNA
gcacatgagacaggctctg

SEQ ID NO: 68808 - RNA, 19 nt, synthetic construct
  misc_feature 1..19: note = siRNA sense sequence
  source 1..19: mol_type = other RNA
agagcctgtctcatgtgcc

SEQ ID NO: 68809 - RNA, 19 nt, synthetic construct
  misc_feature 1..19: note = siRNA antisense sequence
  source 1..19: mol_type = other RNA
ggcacatgagacaggctct

SEQ ID NO: 68810 - RNA, 19 nt, synthetic construct
  misc_feature 1..19: note = siRNA sense sequence
  source 1..19: mol_type = other RNA
gagcctgtctcatgtgcca

SEQ ID NO: 68811 - RNA, 19 nt, synthetic construct
  misc_feature 1..19: note = siRNA antisense sequence
  source 1..19: mol_type = other RNA
tggcacatgagacaggctc

SEQ ID NO: 68812 - RNA, 19 nt, synthetic construct
  misc_feature 1..19: note = siRNA sense sequence
  source 1..19: mol_type = other RNA
agcctgtctcatgtgccag

SEQ ID NO: 68813 - RNA, 19 nt, synthetic construct
  misc_feature 1..19: note = siRNA antisense sequence
  source 1..19: mol_type = other RNA
ctggcacatgagacaggct

SEQ ID NO: 68814 - RNA, 19 nt, synthetic construct
  misc_feature 1..19: note = siRNA sense sequence
  source 1..19: mol_type = other RNA
tgtctcatgtgccaggtgc

SEQ ID NO: 68815 - RNA, 19 nt, synthetic construct
  misc_feature 1..19: note = siRNA antisense sequence
  source 1..19: mol_type = other RNA
gcacctggcacatgagaca

SEQ ID NO: 68816 - RNA, 19 nt, synthetic construct
  misc_feature 1..19: note = siRNA sense sequence
  source 1..19: mol_type = other RNA
gtctcatgtgccaggtgca

SEQ ID NO: 68817 - RNA, 19 nt, synthetic construct
  misc_feature 1..19: note = siRNA antisense sequence
  source 1..19: mol_type = other RNA
tgcacctggcacatgagac

SEQ ID NO: 68818 - RNA, 19 nt, synthetic construct
  misc_feature 1..19: note = siRNA sense sequence
  source 1..19: mol_type = other RNA
tgccaggtgcagtcacatt

SEQ ID NO: 68819 - RNA, 19 nt, synthetic construct
  misc_feature 1..19: note = siRNA antisense sequence
  source 1..19: mol_type = other RNA
aatgtgactgcacctggca

SEQ ID NO: 68820 - RNA, 19 nt, synthetic construct
  misc_feature 1..19: note = siRNA sense sequence
  source 1..19: mol_type = other RNA
gccaggtgcagtcacatta

SEQ ID NO: 68821 - RNA, 19 nt, synthetic construct
  misc_feature 1..19: note = siRNA antisense sequence
  source 1..19: mol_type = other RNA
taatgtgactgcacctggc

SEQ ID NO: 68822 - RNA, 19 nt, synthetic construct
  misc_feature 1..19: note = siRNA sense sequence
  source 1..19: mol_type = other RNA
ccaggtgcagtcacattat

SEQ ID NO: 68823 - RNA, 19 nt, synthetic construct
  misc_feature 1..19: note = siRNA antisense sequence
  source 1..19: mol_type = other RNA
ataatgtgactgcacctgg

SEQ ID NO: 68824 - RNA, 19 nt, synthetic construct
  misc_feature 1..19: note = siRNA sense sequence
  source 1..19: mol_type = other RNA
caggtgcagtcacattatt

SEQ ID NO: 68825 - RNA, 19 nt, synthetic construct
  misc_feature 1..19: note = siRNA antisense sequence
  source 1..19: mol_type = other RNA
aataatgtgactgcacctg

SEQ ID NO: 68826 - RNA, 19 nt, synthetic construct
  misc_feature 1..19: note = siRNA sense sequence
  source 1..19: mol_type = other RNA
aggtgcagtcacattattg

SEQ ID NO: 68827 - RNA, 19 nt, synthetic construct
  misc_feature 1..19: note = siRNA antisense sequence
  source 1..19: mol_type = other RNA
caataatgtgactgcacct

SEQ ID NO: 68828 - RNA, 19 nt, synthetic construct
  misc_feature 1..19: note = siRNA sense sequence
  source 1..19: mol_type = other RNA
gcagtcacattattgttaa

SEQ ID NO: 68829 - RNA, 19 nt, synthetic construct
  misc_feature 1..19: note = siRNA antisense sequence
  source 1..19: mol_type = other RNA
ttaacaataatgtgactgc

SEQ ID NO: 68830 - RNA, 19 nt, synthetic construct
  misc_feature 1..19: note = siRNA sense sequence
  source 1..19: mol_type = other RNA
gttaaaataaagtggcttc

SEQ ID NO: 68831 - RNA, 19 nt, synthetic construct
  misc_feature 1..19: note = siRNA antisense sequence
  source 1..19: mol_type = other RNA
gaagccactttattttaac

SEQ ID NO: 68832 - RNA, 19 nt, synthetic construct
  misc_feature 1..19: note = siRNA sense sequence
  source 1..19: mol_type = other RNA
taaaataaagtggcttctg

SEQ ID NO: 68833 - RNA, 19 nt, synthetic construct
  misc_feature 1..19: note = siRNA antisense sequence
  source 1..19: mol_type = other RNA
cagaagccactttatttta

SEQ ID NO: 68834 - RNA, 19 nt, synthetic construct
  misc_feature 1..19: note = siRNA sense sequence
  source 1..19: mol_type = other RNA
aaaataaagtggcttctga

SEQ ID NO: 68835 - RNA, 19 nt, synthetic construct
  misc_feature 1..19: note = siRNA antisense sequence
  source 1..19: mol_type = other RNA
tcagaagccactttatttt

SEQ ID NO: 68836 - RNA, 19 nt, synthetic construct
  misc_feature 1..19: note = siRNA sense sequence
  source 1..19: mol_type = other RNA
aaataaagtggcttctgac

SEQ ID NO: 68837 - RNA, 19 nt, synthetic construct
  misc_feature 1..19: note = siRNA antisense sequence
  source 1..19: mol_type = other RNA
gtcagaagccactttattt

SEQ ID NO: 68838 - RNA, 19 nt, synthetic construct
  misc_feature 1..19: note = siRNA sense sequence
  source 1..19: mol_type = other RNA
aataaagtggcttctgaca

SEQ ID NO: 68839 - RNA, 19 nt, synthetic construct
  misc_feature 1..19: note = siRNA antisense sequence
  source 1..19: mol_type = other RNA
tgtcagaagccactttatt

SEQ ID NO: 68840 - RNA, 19 nt, synthetic construct
  misc_feature 1..19: note = siRNA sense sequence
  source 1..19: mol_type = other RNA
acttttcatttcttccaac

SEQ ID NO: 68841 - RNA, 19 nt, synthetic construct
  misc_feature 1..19: note = siRNA antisense sequence
  source 1..19: mol_type = other RNA
gttggaagaaatgaaaagt

SEQ ID NO: 68842 - RNA, 19 nt, synthetic construct
  misc_feature 1..19: note = siRNA sense sequence
  source 1..19: mol_type = other RNA
tgctctgagtaccagcttc

SEQ ID NO: 68843 - RNA, 19 nt, synthetic construct
  misc_feature 1..19: note = siRNA antisense sequence
  source 1..19: mol_type = other RNA
gaagctggtactcagagca

SEQ ID NO: 68844 - RNA, 19 nt, synthetic construct
  misc_feature 1..19: note = siRNA sense sequence
  source 1..19: mol_type = other RNA
taccagcttcagtgactca

SEQ ID NO: 68845 - RNA, 19 nt, synthetic construct
  misc_feature 1..19: note = siRNA antisense sequence
  source 1..19: mol_type = other RNA
tgagtcactgaagctggta

SEQ ID NO: 68846 - RNA, 19 nt, synthetic construct
  misc_feature 1..19: note = siRNA sense sequence
  source 1..19: mol_type = other RNA
accagcttcagtgactcaa

SEQ ID NO: 68847 - RNA, 19 nt, synthetic construct
  misc_feature 1..19: note = siRNA antisense sequence
  source 1..19: mol_type = other RNA
ttgagtcactgaagctggt

SEQ ID NO: 68848 - RNA, 19 nt, synthetic construct
  misc_feature 1..19: note = siRNA sense sequence
  source 1..19: mol_type = other RNA
cagcttcagtgactcaatc

SEQ ID NO: 68849 - RNA, 19 nt, synthetic construct
  misc_feature 1..19: note = siRNA antisense sequence
  source 1..19: mol_type = other RNA
gattgagtcactgaagctg

SEQ ID NO: 68850 - RNA, 19 nt, synthetic construct
  misc_feature 1..19: note = siRNA sense sequence
  source 1..19: mol_type = other RNA
agcttcagtgactcaatca

SEQ ID NO: 68851 - RNA, 19 nt, synthetic construct
  misc_feature 1..19: note = siRNA antisense sequence
  source 1..19: mol_type = other RNA
tgattgagtcactgaagct

SEQ ID NO: 68852 - RNA, 19 nt, synthetic construct
  misc_feature 1..19: note = siRNA sense sequence
  source 1..19: mol_type = other RNA
tcagtgactcaatcattta

SEQ ID NO: 68853 - RNA, 19 nt, synthetic construct
  misc_feature 1..19: note = siRNA antisense sequence
  source 1..19: mol_type = other RNA
taaatgattgagtcactga

SEQ ID NO: 68854 - RNA, 19 nt, synthetic construct
  misc_feature 1..19: note = siRNA sense sequence
  source 1..19: mol_type = other RNA
cagtgactcaatcatttat

SEQ ID NO: 68855 - RNA, 19 nt, synthetic construct
  misc_feature 1..19: note = siRNA antisense sequence
  source 1..19: mol_type = other RNA
ataaatgattgagtcactg

SEQ ID NO: 68856 - RNA, 19 nt, synthetic construct
  misc_feature 1..19: note = siRNA sense sequence
  source 1..19: mol_type = other RNA
tttatacaggatttcagtg

SEQ ID NO: 68857 - RNA, 19 nt, synthetic construct
  misc_feature 1..19: note = siRNA antisense sequence
  source 1..19: mol_type = other RNA
cactgaaatcctgtataaa

SEQ ID NO: 68858 - RNA, 19 nt, synthetic construct
  misc_feature 1..19: note = siRNA sense sequence
  source 1..19: mol_type = other RNA
ttatacaggatttcagtgt

SEQ ID NO: 68859 - RNA, 19 nt, synthetic construct
  misc_feature 1..19: note = siRNA antisense sequence
  source 1..19: mol_type = other RNA
acactgaaatcctgtataa

SEQ ID NO: 68860 - RNA, 19 nt, synthetic construct
  misc_feature 1..19: note = siRNA sense sequence
  source 1..19: mol_type = other RNA
acaggatttcagtgttttg

SEQ ID NO: 68861 - RNA, 19 nt, synthetic construct
  misc_feature 1..19: note = siRNA antisense sequence
  source 1..19: mol_type = other RNA
caaaacactgaaatcctgt

SEQ ID NO: 68862 - RNA, 19 nt, synthetic construct
  misc_feature 1..19: note = siRNA sense sequence
  source 1..19: mol_type = other RNA
caggatttcagtgttttgt

SEQ ID NO: 68863 - RNA, 19 nt, synthetic construct
  misc_feature 1..19: note = siRNA antisense sequence
  source 1..19: mol_type = other RNA
acaaaacactgaaatcctg

SEQ ID NO: 68864 - RNA, 19 nt, synthetic construct
  misc_feature 1..19: note = siRNA sense sequence
  source 1..19: mol_type = other RNA
atttcagtgttttgttctg

SEQ ID NO: 68865 - RNA, 19 nt, synthetic construct
  misc_feature 1..19: note = siRNA antisense sequence
  source 1..19: mol_type = other RNA
cagaacaaaacactgaaat

SEQ ID NO: 68866 - RNA, 19 nt, synthetic construct
  misc_feature 1..19: note = siRNA sense sequence
  source 1..19: mol_type = other RNA
tttcagtgttttgttctgc

SEQ ID NO: 68867 - RNA, 19 nt, synthetic construct
  misc_feature 1..19: note = siRNA antisense sequence
  source 1..19: mol_type = other RNA
gcagaacaaaacactgaaa

SEQ ID NO: 68868 - RNA, 19 nt, synthetic construct
  misc_feature 1..19: note = siRNA sense sequence
  source 1..19: mol_type = other RNA
ttcagtgttttgttctgca

SEQ ID NO: 68869 - RNA, 19 nt, synthetic construct
  misc_feature 1..19: note = siRNA antisense sequence
  source 1..19: mol_type = other RNA
tgcagaacaaaacactgaa

SEQ ID NO: 68870 - RNA, 19 nt, synthetic construct
  misc_feature 1..19: note = siRNA sense sequence
  source 1..19: mol_type = other RNA
gtgttttgttctgcagcgg

SEQ ID NO: 68871 - RNA, 19 nt, synthetic construct
  misc_feature 1..19: note = siRNA antisense sequence
  source 1..19: mol_type = other RNA
ccgctgcagaacaaaacac

SEQ ID NO: 68872 - RNA, 19 nt, synthetic construct
  misc_feature 1..19: note = siRNA sense sequence
  source 1..19: mol_type = other RNA
tgttttgttctgcagcggt

SEQ ID NO: 68873 - RNA, 19 nt, synthetic construct
  misc_feature 1..19: note = siRNA antisense sequence
  source 1..19: mol_type = other RNA
accgctgcagaacaaaaca

SEQ ID NO: 68874 - RNA, 19 nt, synthetic construct
  misc_feature 1..19: note = siRNA sense sequence
  source 1..19: mol_type = other RNA
gttttgttctgcagcggtg

SEQ ID NO: 68875 - RNA, 19 nt, synthetic construct
  misc_feature 1..19: note = siRNA antisense sequence
  source 1..19: mol_type = other RNA
caccgctgcagaacaaaac

SEQ ID NO: 68876 - RNA, 19 nt, synthetic construct
  misc_feature 1..19: note = siRNA sense sequence
  source 1..19: mol_type = other RNA
ttttgttctgcagcggtgt

SEQ ID NO: 68877 - RNA, 19 nt, synthetic construct
  misc_feature 1..19: note = siRNA antisense sequence
  source 1..19: mol_type = other RNA
acaccgctgcagaacaaaa

SEQ ID NO: 68878 - RNA, 19 nt, synthetic construct
  misc_feature 1..19: note = siRNA sense sequence
  source 1..19: mol_type = other RNA
tttgttctgcagcggtgtt

SEQ ID NO: 68879 - RNA, 19 nt, synthetic construct
  misc_feature 1..19: note = siRNA antisense sequence
  source 1..19: mol_type = other RNA
aacaccgctgcagaacaaa

SEQ ID NO: 68880 - RNA, 19 nt, synthetic construct
  misc_feature 1..19: note = siRNA sense sequence
  source 1..19: mol_type = other RNA
ttgttctgcagcggtgttc

SEQ ID NO: 68881 - RNA, 19 nt, synthetic construct
  misc_feature 1..19: note = siRNA antisense sequence
  source 1..19: mol_type = other RNA
gaacaccgctgcagaacaa

SEQ ID NO: 68882 - RNA, 19 nt, synthetic construct
  misc_feature 1..19: note = siRNA sense sequence
  source 1..19: mol_type = other RNA
tgttctgcagcggtgttct

SEQ ID NO: 68883 - RNA, 19 nt, synthetic construct
  misc_feature 1..19: note = siRNA antisense sequence
  source 1..19: mol_type = other RNA
agaacaccgctgcagaaca

SEQ ID NO: 68884 - RNA, 19 nt, synthetic construct
  misc_feature 1..19: note = siRNA sense sequence
  source 1..19: mol_type = other RNA
gttctgcagcggtgttcta

SEQ ID NO: 68885 - RNA, 19 nt, synthetic construct
  misc_feature 1..19: note = siRNA antisense sequence
  source 1..19: mol_type = other RNA
tagaacaccgctgcagaac

SEQ ID NO: 68886 - RNA, 19 nt, synthetic construct
  misc_feature 1..19: note = siRNA sense sequence
  source 1..19: mol_type = other RNA
ttctgcagcggtgttctaa

SEQ ID NO: 68887 - RNA, 19 nt, synthetic construct
  misc_feature 1..19: note = siRNA antisense sequence
  source 1..19: mol_type = other RNA
ttagaacaccgctgcagaa

SEQ ID NO: 68888 - RNA, 19 nt, synthetic construct
  misc_feature 1..19: note = siRNA sense sequence
  source 1..19: mol_type = other RNA
tctgcagcggtgttctaaa

SEQ ID NO: 68889 - RNA, 19 nt, synthetic construct
  misc_feature 1..19: note = siRNA antisense sequence
  source 1..19: mol_type = other RNA
tttagaacaccgctgcaga

SEQ ID NO: 68890 - RNA, 19 nt, synthetic construct
  misc_feature 1..19: note = siRNA sense sequence
  source 1..19: mol_type = other RNA
ctgcagcggtgttctaaag

SEQ ID NO: 68891 - RNA, 19 nt, synthetic construct
  misc_feature 1..19: note = siRNA antisense sequence
  source 1..19: mol_type = other RNA
ctttagaacaccgctgcag

SEQ ID NO: 68892 - RNA, 19 nt, synthetic construct
  misc_feature 1..19: note = siRNA sense sequence
  source 1..19: mol_type = other RNA
tgcagcggtgttctaaagg

SEQ ID NO: 68893 - RNA, 19 nt, synthetic construct
  misc_feature 1..19: note = siRNA antisense sequence
  source 1..19: mol_type = other RNA
cctttagaacaccgctgca

SEQ ID NO: 68894 - RNA, 19 nt, synthetic construct
  misc_feature 1..19: note = siRNA sense sequence
  source 1..19: mol_type = other RNA
gcagcggtgttctaaaggg

SEQ ID NO: 68895 - RNA, 19 nt, synthetic construct
  misc_feature 1..19: note = siRNA antisense sequence
  source 1..19: mol_type = other RNA
ccctttagaacaccgctgc

SEQ ID NO: 68896 - RNA, 19 nt, synthetic construct
  misc_feature 1..19: note = siRNA sense sequence
  source 1..19: mol_type = other RNA
cagcggtgttctaaagggt

SEQ ID NO: 68897 - RNA, 19 nt, synthetic construct
  misc_feature 1..19: note = siRNA antisense sequence
  source 1..19: mol_type = other RNA
accctttagaacaccgctg

SEQ ID NO: 68898 - RNA, 19 nt, synthetic construct
  misc_feature 1..19: note = siRNA sense sequence
  source 1..19: mol_type = other RNA
agcggtgttctaaagggtt

SEQ ID NO: 68899 - RNA, 19 nt, synthetic construct
  misc_feature 1..19: note = siRNA antisense sequence
  source 1..19: mol_type = other RNA
aaccctttagaacaccgct

SEQ ID NO: 68900 - RNA, 19 nt, synthetic construct
  misc_feature 1..19: note = siRNA sense sequence
  source 1..19: mol_type = other RNA
gcggtgttctaaagggttc

SEQ ID NO: 68901 - RNA, 19 nt, synthetic construct
  misc_feature 1..19: note = siRNA antisense sequence
  source 1..19: mol_type = other RNA
gaaccctttagaacaccgc

SEQ ID NO: 68902 - RNA, 19 nt, synthetic construct
  misc_feature 1..19: note = siRNA sense sequence
  source 1..19: mol_type = other RNA
cggtgttctaaagggttca

SEQ ID NO: 68903 - RNA, 19 nt, synthetic construct
  misc_feature 1..19: note = siRNA antisense sequence
  source 1..19: mol_type = other RNA
tgaaccctttagaacaccg

SEQ ID NO: 68904 - RNA, 19 nt, synthetic construct
  misc_feature 1..19: note = siRNA sense sequence
  source 1..19: mol_type = other RNA
ggtgttctaaagggttcac

SEQ ID NO: 68905 - RNA, 19 nt, synthetic construct
  misc_feature 1..19: note = siRNA antisense sequence
  source 1..19: mol_type = other RNA
gtgaaccctttagaacacc

SEQ ID NO: 68906 - RNA, 19 nt, synthetic construct
  misc_feature 1..19: note = siRNA sense sequence
  source 1..19: mol_type = other RNA
gtgttctaaagggttcaca

SEQ ID NO: 68907 - RNA, 19 nt, synthetic construct
  misc_feature 1..19: note = siRNA antisense sequence
  source 1..19: mol_type = other RNA
tgtgaaccctttagaacac

SEQ ID NO: 68908 - RNA, 19 nt, synthetic construct
  misc_feature 1..19: note = siRNA sense sequence
  source 1..19: mol_type = other RNA
tgttctaaagggttcacat

SEQ ID NO: 68909 - RNA, 19 nt, synthetic construct
  misc_feature 1..19: note = siRNA antisense sequence
  source 1..19: mol_type = other RNA
atgtgaaccctttagaaca

SEQ ID NO: 68910 - RNA, 19 nt, synthetic construct
  misc_feature 1..19: note = siRNA sense sequence
  source 1..19: mol_type = other RNA
gttctaaagggttcacata

SEQ ID NO: 68911 - RNA, 19 nt, synthetic construct
  misc_feature 1..19: note = siRNA antisense sequence
  source 1..19: mol_type = other RNA
tatgtgaaccctttagaac

SEQ ID NO: 68912 - RNA, 19 nt, synthetic construct
  misc_feature 1..19: note = siRNA sense sequence
  source 1..19: mol_type = other RNA
ttctaaagggttcacatag

SEQ ID NO: 68913 - RNA, 19 nt, synthetic construct
  misc_feature 1..19: note = siRNA antisense sequence
  source 1..19: mol_type = other RNA
ctatgtgaaccctttagaa

SEQ ID NO: 68914 - RNA, 19 nt, synthetic construct
  misc_feature 1..19: note = siRNA sense sequence
  source 1..19: mol_type = other RNA
tctaaagggttcacatagt

SEQ ID NO: 68915 - RNA, 19 nt, synthetic construct
  misc_feature 1..19: note = siRNA antisense sequence
  source 1..19: mol_type = other RNA
actatgtgaaccctttaga

SEQ ID NO: 68916 - RNA, 19 nt, synthetic construct
  misc_feature 1..19: note = siRNA sense sequence
  source 1..19: mol_type = other RNA
ctaaagggttcacatagta

SEQ ID NO: 68917 - RNA, 19 nt, synthetic construct
  misc_feature 1..19: note = siRNA antisense sequence
  source 1..19: mol_type = other RNA
tactatgtgaaccctttag

SEQ ID NO: 68918 - RNA, 19 nt, synthetic construct
  misc_feature 1..19: note = siRNA sense sequence
  source 1..19: mol_type = other RNA
taaagggttcacatagtat

SEQ ID NO: 68919 - RNA, 19 nt, synthetic construct
  misc_feature 1..19: note = siRNA antisense sequence
  source 1..19: mol_type = other RNA
atactatgtgaacccttta

SEQ ID NO: 68920 - RNA, 19 nt, synthetic construct
  misc_feature 1..19: note = siRNA sense sequence
  source 1..19: mol_type = other RNA
aaagggttcacatagtata

SEQ ID NO: 68921 - RNA, 19 nt, synthetic construct
  misc_feature 1..19: note = siRNA antisense sequence
  source 1..19: mol_type = other RNA
tatactatgtgaacccttt

SEQ ID NO: 68922 - RNA, 19 nt, synthetic construct
  misc_feature 1..19: note = siRNA sense sequence
  source 1..19: mol_type = other RNA
aagggttcacatagtataa

SEQ ID NO: 68923 - RNA, 19 nt, synthetic construct
  misc_feature 1..19: note = siRNA antisense sequence
  source 1..19: mol_type = other RNA
ttatactatgtgaaccctt

SEQ ID NO: 68924 - RNA, 19 nt, synthetic construct
  misc_feature 1..19: note = siRNA sense sequence
  source 1..19: mol_type = other RNA
agggttcacatagtataat

SEQ ID NO: 68925 - RNA, 19 nt, synthetic construct
  misc_feature 1..19: note = siRNA antisense sequence
  source 1..19: mol_type = other RNA
attatactatgtgaaccct

SEQ ID NO: 68926 - RNA, 19 nt, synthetic construct
  misc_feature 1..19: note = siRNA sense sequence
  source 1..19: mol_type = other RNA
gggttcacatagtataatg

SEQ ID NO: 68927 - RNA, 19 nt, synthetic construct
  misc_feature 1..19: note = siRNA antisense sequence
  source 1..19: mol_type = other RNA
cattatactatgtgaaccc

SEQ ID NO: 68928 - RNA, 19 nt, synthetic construct
  misc_feature 1..19: note = siRNA sense sequence
  source 1..19: mol_type = other RNA
ggttcacatagtataatgg

SEQ ID NO: 68929 - RNA, 19 nt, synthetic construct
  misc_feature 1..19: note = siRNA antisense sequence
  source 1..19: mol_type = other RNA
ccattatactatgtgaacc

SEQ ID NO: 68930 - RNA, 19 nt, synthetic construct
  misc_feature 1..19: note = siRNA sense sequence
  source 1..19: mol_type = other RNA
gttcacatagtataatgga

SEQ ID NO: 68931 - RNA, 19 nt, synthetic construct
  misc_feature 1..19: note = siRNA antisense sequence
  source 1..19: mol_type = other RNA
tccattatactatgtgaac

SEQ ID NO: 68932 - RNA, 19 nt, synthetic construct
  misc_feature 1..19: note = siRNA sense sequence
  source 1..19: mol_type = other RNA
caaagcagaatatacttcc

SEQ ID NO: 68933 - RNA, 19 nt, synthetic construct
  misc_feature 1..19: note = siRNA antisense sequence
  source 1..19: mol_type = other RNA
ggaagtatattctgctttg

SEQ ID NO: 68934 - RNA, 19 nt, synthetic construct
  misc_feature 1..19: note = siRNA sense sequence
  source 1..19: mol_type = other RNA
aaagcagaatatacttcca

SEQ ID NO: 68935 - RNA, 19 nt, synthetic construct
  misc_feature 1..19: note = siRNA antisense sequence
  source 1..19: mol_type = other RNA
tggaagtatattctgcttt

SEQ ID NO: 68936 - RNA, 19 nt, synthetic construct
  misc_feature 1..19: note = siRNA sense sequence
  source 1..19: mol_type = other RNA
aagcagaatatacttccaa

SEQ ID NO: 68937 - RNA, 19 nt, synthetic construct
  misc_feature 1..19: note = siRNA antisense sequence
  source 1..19: mol_type = other RNA
ttggaagtatattctgctt

SEQ ID NO: 68938 - RNA, 19 nt, synthetic construct
  misc_feature 1..19: note = siRNA sense sequence
  source 1..19: mol_type = other RNA
agcagaatatacttccaag

SEQ ID NO: 68939 - RNA, 19 nt, synthetic construct
  misc_feature 1..19: note = siRNA antisense sequence
  source 1..19: mol_type = other RNA
cttggaagtatattctgct

SEQ ID NO: 68940 - RNA, 19 nt, synthetic construct
  misc_feature 1..19: note = siRNA sense sequence
  source 1..19: mol_type = other RNA
gcagaatatacttccaagc

SEQ ID NO: 68941 - RNA, 19 nt, synthetic construct
  misc_feature 1..19: note = siRNA antisense sequence
  source 1..19: mol_type = other RNA
gcttggaagtatattctgc

SEQ ID NO: 68942 - RNA, 19 nt, synthetic construct
  misc_feature 1..19: note = siRNA sense sequence
  source 1..19: mol_type = other RNA
cagaatatacttccaagct

SEQ ID NO: 68943 - RNA, 19 nt, synthetic construct
  misc_feature 1..19: note = siRNA antisense sequence
  source 1..19: mol_type = other RNA
agcttggaagtatattctg

SEQ ID NO: 68944 - RNA, 19 nt, synthetic construct
  misc_feature 1..19: note = siRNA sense sequence
  source 1..19: mol_type = other RNA
agaatatacttccaagctg

SEQ ID NO: 68945 - RNA, 19 nt, synthetic construct
  misc_feature 1..19: note = siRNA antisense sequence
  source 1..19: mol_type = other RNA
cagcttggaagtatattct

SEQ ID NO: 68946 - RNA, 19 nt, synthetic construct
  misc_feature 1..19: note = siRNA sense sequence
  source 1..19: mol_type = other RNA
aactgttatgggacactat

SEQ ID NO: 68947 - RNA, 19 nt, synthetic construct
  misc_feature 1..19: note = siRNA antisense sequence
  source 1..19: mol_type = other RNA
atagtgtcccataacagtt

SEQ ID NO: 68948 - RNA, 19 nt, synthetic construct
  misc_feature 1..19: note = siRNA sense sequence
  source 1..19: mol_type = other RNA
actgttatgggacactatc

SEQ ID NO: 68949 - RNA, 19 nt, synthetic construct
  misc_feature 1..19: note = siRNA antisense sequence
  source 1..19: mol_type = other RNA
gatagtgtcccataacagt

SEQ ID NO: 68950 - RNA, 19 nt, synthetic construct
  misc_feature 1..19: note = siRNA sense sequence
  source 1..19: mol_type = other RNA
ctgttatgggacactatca

SEQ ID NO: 68951 - RNA, 19 nt, synthetic construct
  misc_feature 1..19: note = siRNA antisense sequence
  source 1..19: mol_type = other RNA
tgatagtgtcccataacag

SEQ ID NO: 68952 - RNA, 19 nt, synthetic construct
  misc_feature 1..19: note = siRNA sense sequence
  source 1..19: mol_type = other RNA
tgttatgggacactatcag

SEQ ID NO: 68953 - RNA, 19 nt, synthetic construct
  misc_feature 1..19: note = siRNA antisense sequence
  source 1..19: mol_type = other RNA
ctgatagtgtcccataaca

SEQ ID NO: 68954 - RNA, 19 nt, synthetic construct
  misc_feature 1..19: note = siRNA sense sequence
  source 1..19: mol_type = other RNA
gttatgggacactatcagc

SEQ ID NO: 68955 - RNA, 19 nt, synthetic construct
  misc_feature 1..19: note = siRNA antisense sequence
  source 1..19: mol_type = other RNA
gctgatagtgtcccataac

SEQ ID NO: 68956 - RNA, 19 nt, synthetic construct
  misc_feature 1..19: note = siRNA sense sequence
  source 1..19: mol_type = other RNA
tgggacactatcagcaact

SEQ ID NO: 68957 - RNA, 19 nt, synthetic construct
  misc_feature 1..19: note = siRNA antisense sequence
  source 1..19: mol_type = other RNA
agttgctgatagtgtccca

SEQ ID NO: 68958 - RNA, 19 nt, synthetic construct
  misc_feature 1..19: note = siRNA sense sequence
  source 1..19: mol_type = other RNA
gggacactatcagcaacta

SEQ ID NO: 68959 - RNA, 19 nt, synthetic construct
  misc_feature 1..19: note = siRNA antisense sequence
  source 1..19: mol_type = other RNA
tagttgctgatagtgtccc

SEQ ID NO: 68960 - RNA, 19 nt, synthetic construct
  misc_feature 1..19: note = siRNA sense sequence
  source 1..19: mol_type = other RNA
ggacactatcagcaactac

SEQ ID NO: 68961 - RNA, 19 nt, synthetic construct
  misc_feature 1..19: note = siRNA antisense sequence
  source 1..19: mol_type = other RNA
gtagttgctgatagtgtcc

SEQ ID NO: 68962 - RNA, 19 nt, synthetic construct
  misc_feature 1..19: note = siRNA sense sequence
  source 1..19: mol_type = other RNA
ggaagctagcaggatttag

SEQ ID NO: 68963 - RNA, 19 nt, synthetic construct
  misc_feature 1..19: note = siRNA antisense sequence
  source 1..19: mol_type = other RNA
ctaaatcctgctagcttcc

SEQ ID NO: 68964 - RNA, 19 nt, synthetic construct
  misc_feature 1..19: note = siRNA sense sequence
  source 1..19: mol_type = other RNA
ctagcaggatttagctctt

SEQ ID NO: 68965 - RNA, 19 nt, synthetic construct
  misc_feature 1..19: note = siRNA antisense sequence
  source 1..19: mol_type = other RNA
aagagctaaatcctgctag

SEQ ID NO: 68966 - RNA, 19 nt, synthetic construct
  misc_feature 1..19: note = siRNA sense sequence
  source 1..19: mol_type = other RNA
tagcaggatttagctcttc

SEQ ID NO: 68967 - RNA, 19 nt, synthetic construct
  misc_feature 1..19: note = siRNA antisense sequence
  source 1..19: mol_type = other RNA
gaagagctaaatcctgcta

SEQ ID NO: 68968 - RNA, 19 nt, synthetic construct
  misc_feature 1..19: note = siRNA sense sequence
  source 1..19: mol_type = other RNA
aggatttagctcttcaatg

SEQ ID NO: 68969 - RNA, 19 nt, synthetic construct
  misc_feature 1..19: note = siRNA antisense sequence
  source 1..19: mol_type = other RNA
cattgaagagctaaatcct

SEQ ID NO: 68970 - RNA, 19 nt, synthetic construct
  misc_feature 1..19: note = siRNA sense sequence
  source 1..19: mol_type = other RNA
ggatttagctcttcaatgg

SEQ ID NO: 68971 - RNA, 19 nt, synthetic construct
  misc_feature 1..19: note = siRNA antisense sequence
  source 1..19: mol_type = other RNA
ccattgaagagctaaatcc

SEQ ID NO: 68972 - RNA, 19 nt, synthetic construct
  misc_feature 1..19: note = siRNA sense sequence
  source 1..19: mol_type = other RNA
gatttagctcttcaatggc

SEQ ID NO: 68973 - RNA, 19 nt, synthetic construct
  misc_feature 1..19: note = siRNA antisense sequence
  source 1..19: mol_type = other RNA
gccattgaagagctaaatc

SEQ ID NO: 68974 - RNA, 19 nt, synthetic construct
  misc_feature 1..19: note = siRNA sense sequence
  source 1..19: mol_type = other RNA
atttagctcttcaatggcc

SEQ ID NO: 68975 - RNA, 19 nt, synthetic construct
  misc_feature 1..19: note = siRNA antisense sequence
  source 1..19: mol_type = other RNA
ggccattgaagagctaaat

SEQ ID NO: 68976 - RNA, 19 nt, synthetic construct
  misc_feature 1..19: note = siRNA sense sequence
  source 1..19: mol_type = other RNA
tttagctcttcaatggccc

SEQ ID NO: 68977 - RNA, 19 nt, synthetic construct
  misc_feature 1..19: note = siRNA antisense sequence
  source 1..19: mol_type = other RNA
gggccattgaagagctaaa

SEQ ID NO: 68978 - RNA, 19 nt, synthetic construct
  misc_feature 1..19: note = siRNA sense sequence
  source 1..19: mol_type = other RNA
ttagctcttcaatggccct

SEQ ID NO: 68979 - RNA, 19 nt, synthetic construct
  misc_feature 1..19: note = siRNA antisense sequence
  source 1..19: mol_type = other RNA
agggccattgaagagctaa

SEQ ID NO: 68980 - RNA, 19 nt, synthetic construct
  misc_feature 1..19: note = siRNA sense sequence
  source 1..19: mol_type = other RNA
tagctcttcaatggccctc

SEQ ID NO: 68981 - RNA, 19 nt, synthetic construct
  misc_feature 1..19: note = siRNA antisense sequence
  source 1..19: mol_type = other RNA
gagggccattgaagagcta

SEQ ID NO: 68982 - RNA, 19 nt, synthetic construct
  misc_feature 1..19: note = siRNA sense sequence
  source 1..19: mol_type = other RNA
agctcttcaatggccctcc

SEQ ID NO: 68983 - RNA, 19 nt, synthetic construct
  misc_feature 1..19: note = siRNA antisense sequence
  source 1..19: mol_type = other RNA
ggagggccattgaagagct

SEQ ID NO: 68984 - RNA, 19 nt, synthetic construct
  misc_feature 1..19: note = siRNA sense sequence
  source 1..19: mol_type = other RNA
cttcaatggccctccaaat

SEQ ID NO: 68985 - RNA, 19 nt, synthetic construct
  misc_feature 1..19: note = siRNA antisense sequence
  source 1..19: mol_type = other RNA
atttggagggccattgaag

SEQ ID NO: 68986 - RNA, 19 nt, synthetic construct
  misc_feature 1..19: note = siRNA sense sequence
  source 1..19: mol_type = other RNA
ttcaatggccctccaaatg

SEQ ID NO: 68987 - RNA, 19 nt, synthetic construct
  misc_feature 1..19: note = siRNA antisense sequence
  source 1..19: mol_type = other RNA
catttggagggccattgaa

SEQ ID NO: 68988 - RNA, 19 nt, synthetic construct
  misc_feature 1..19: note = siRNA sense sequence
  source 1..19: mol_type = other RNA
tcaatggccctccaaatgc

SEQ ID NO: 68989 - RNA, 19 nt, synthetic construct
  misc_feature 1..19: note = siRNA antisense sequence
  source 1..19: mol_type = other RNA
gcatttggagggccattga

SEQ ID NO: 68990 - RNA, 19 nt, synthetic construct
  misc_feature 1..19: note = siRNA sense sequence
  source 1..19: mol_type = other RNA
tggccctccaaatgcaccc

SEQ ID NO: 68991 - RNA, 19 nt, synthetic construct
  misc_feature 1..19: note = siRNA antisense sequence
  source 1..19: mol_type = other RNA
gggtgcatttggagggcca

SEQ ID NO: 68992 - RNA, 19 nt, synthetic construct
  misc_feature 1..19: note = siRNA sense sequence
  source 1..19: mol_type = other RNA
ggccctccaaatgcaccca

SEQ ID NO: 68993 - RNA, 19 nt, synthetic construct
  misc_feature 1..19: note = siRNA antisense sequence
  source 1..19: mol_type = other RNA
tgggtgcatttggagggcc

SEQ ID NO: 68994 - RNA, 19 nt, synthetic construct
  misc_feature 1..19: note = siRNA sense sequence
  source 1..19: mol_type = other RNA
gccctccaaatgcacccaa

SEQ ID NO: 68995 - RNA, 19 nt, synthetic construct
  misc_feature 1..19: note = siRNA antisense sequence
  source 1..19: mol_type = other RNA
ttgggtgcatttggagggc

SEQ ID NO: 68996 - RNA, 19 nt, synthetic construct
  misc_feature 1..19: note = siRNA sense sequence
  source 1..19: mol_type = other RNA
ccctccaaatgcacccaac

SEQ ID NO: 68997 - RNA, 19 nt, synthetic construct
  misc_feature 1..19: note = siRNA antisense sequence
  source 1..19: mol_type = other RNA
gttgggtgcatttggaggg

SEQ ID NO: 68998 - RNA, 19 nt, synthetic construct
  misc_feature 1..19: note = siRNA sense sequence
  source 1..19: mol_type = other RNA
caatcgccaacctcaccca

SEQ ID NO: 68999 - RNA, 19 nt, synthetic construct
  misc_feature 1..19: note = siRNA antisense sequence
  source 1..19: mol_type = other RNA
tgggtgaggttggcgattg

SEQ ID NO: 69000 - RNA, 19 nt, synthetic construct
  misc_feature 1..19: note = siRNA sense sequence
  source 1..19: mol_type = other RNA
aatcgccaacctcacccat

SEQ ID NO: 69001 - RNA, 19 nt, synthetic construct
  misc_feature 1..19: note = siRNA antisense sequence
  source 1..19: mol_type = other RNA
atgggtgaggttggcgatt

SEQ ID NO: 69002 - RNA, 19 nt, synthetic construct
  misc_feature 1..19: note = siRNA sense sequence
  source 1..19: mol_type = other RNA
atcgccaacctcacccatg

SEQ ID NO: 69003 - RNA, 19 nt, synthetic construct
  misc_feature 1..19: note = siRNA antisense sequence
  source 1..19: mol_type = other RNA
catgggtgaggttggcgat

SEQ ID NO: 69004 - RNA, 19 nt, synthetic construct
  misc_feature 1..19: note = siRNA sense sequence
  source 1..19: mol_type = other RNA
tcgccaacctcacccatgg

SEQ ID NO: 69005 - RNA, 19 nt, synthetic construct
  misc_feature 1..19: note = siRNA antisense sequence
  source 1..19: mol_type = other RNA
ccatgggtgaggttggcga

SEQ ID NO: 69006 - RNA, 19 nt, synthetic construct
  misc_feature 1..19: note = siRNA sense sequence
  source 1..19: mol_type = other RNA
cgccaacctcacccatgga

SEQ ID NO: 69007 - RNA, 19 nt, synthetic construct
  misc_feature 1..19: note = siRNA antisense sequence
  source 1..19: mol_type = other RNA
tccatgggtgaggttggcg

SEQ ID NO: 69008 - RNA, 19 nt, synthetic construct
  misc_feature 1..19: note = siRNA sense sequence
  source 1..19: mol_type = other RNA
gccaacctcacccatggaa

SEQ ID NO: 69009 - RNA, 19 nt, synthetic construct
  misc_feature 1..19: note = siRNA antisense sequence
  source 1..19: mol_type = other RNA
ttccatgggtgaggttggc

SEQ ID NO: 69010 - RNA, 19 nt, synthetic construct
  misc_feature 1..19: note = siRNA sense sequence
  source 1..19: mol_type = other RNA
aaaagaagggccttaaagt

SEQ ID NO: 69011 - RNA, 19 nt, synthetic construct
  misc_feature 1..19: note = siRNA antisense sequence
  source 1..19: mol_type = other RNA
actttaaggcccttctttt

SEQ ID NO: 69012 - RNA, 19 nt, synthetic construct
  misc_feature 1..19: note = siRNA sense sequence
  source 1..19: mol_type = other RNA
aaagaagggccttaaagtc

SEQ ID NO: 69013 - RNA, 19 nt, synthetic construct
  misc_feature 1..19: note = siRNA antisense sequence
  source 1..19: mol_type = other RNA
gactttaaggcccttcttt

SEQ ID NO: 69014 - RNA, 19 nt, synthetic construct
  misc_feature 1..19: note = siRNA sense sequence
  source 1..19: mol_type = other RNA
aagaagggccttaaagtcc

SEQ ID NO: 69015 - RNA, 19 nt, synthetic construct
  misc_feature 1..19: note = siRNA antisense sequence
  source 1..19: mol_type = other RNA
ggactttaaggcccttctt

SEQ ID NO: 69016 - RNA, 19 nt, synthetic construct
  misc_feature 1..19: note = siRNA sense sequence
  source 1..19: mol_type = other RNA
agaagggccttaaagtcct

SEQ ID NO: 69017 - RNA, 19 nt, synthetic construct
  misc_feature 1..19: note = siRNA antisense sequence
  source 1..19: mol_type = other RNA
aggactttaaggcccttct

SEQ ID NO: 69018 - RNA, 19 nt, synthetic construct
  misc_feature 1..19: note = siRNA sense sequence
  source 1..19: mol_type = other RNA
gaagggccttaaagtcctc

SEQ ID NO: 69019 - RNA, 19 nt, synthetic construct
  misc_feature 1..19: note = siRNA antisense sequence
  source 1..19: mol_type = other RNA
gaggactttaaggcccttc

SEQ ID NO: 69020 - RNA, 19 nt, synthetic construct
  misc_feature 1..19: note = siRNA sense sequence
  source 1..19: mol_type = other RNA
ggccttaaagtcctcacat

SEQ ID NO: 69021 - RNA, 19 nt, synthetic construct
  misc_feature 1..19: note = siRNA antisense sequence
  source 1..19: mol_type = other RNA
atgtgaggactttaaggcc

SEQ ID NO: 69022 - RNA, 19 nt, synthetic construct
  misc_feature 1..19: note = siRNA sense sequence
  source 1..19: mol_type = other RNA
gccttaaagtcctcacatg

SEQ ID NO: 69023 - RNA, 19 nt, synthetic construct
  misc_feature 1..19: note = siRNA antisense sequence
  source 1..19: mol_type = other RNA
catgtgaggactttaaggc

SEQ ID NO: 69024 - RNA, 19 nt, synthetic construct
  misc_feature 1..19: note = siRNA sense sequence
  source 1..19: mol_type = other RNA
ccttaaagtcctcacatgg

SEQ ID NO: 69025 - RNA, 19 nt, synthetic construct
  misc_feature 1..19: note = siRNA antisense sequence
  source 1..19: mol_type = other RNA
ccatgtgaggactttaagg

SEQ ID NO: 69026 - RNA, 19 nt, synthetic construct
  misc_feature 1..19: note = siRNA sense sequence
  source 1..19: mol_type = other RNA
cttaaagtcctcacatgga

SEQ ID NO: 69027 - RNA, 19 nt, synthetic construct
  misc_feature 1..19: note = siRNA antisense sequence
  source 1..19: mol_type = other RNA
tccatgtgaggactttaag

SEQ ID NO: 69028 - RNA, 19 nt, synthetic construct
  misc_feature 1..19: note = siRNA sense sequence
  source 1..19: mol_type = other RNA
ttaaagtcctcacatggat

SEQ ID NO: 69029 - RNA, 19 nt, synthetic construct
  misc_feature 1..19: note = siRNA antisense sequence
  source 1..19: mol_type = other RNA
atccatgtgaggactttaa

SEQ ID NO: 69030 - RNA, 19 nt, synthetic construct
  misc_feature 1..19: note = siRNA sense sequence
  source 1..19: mol_type = other RNA
taaagtcctcacatggatg

SEQ ID NO: 69031 - RNA, 19 nt, synthetic construct
  misc_feature 1..19: note = siRNA antisense sequence
  source 1..19: mol_type = other RNA
catccatgtgaggacttta

SEQ ID NO: 69032 - RNA, 19 nt, synthetic construct
  misc_feature 1..19: note = siRNA sense sequence
  source 1..19: mol_type = other RNA
gtcctcacatggatgctgt

SEQ ID NO: 69033 - RNA, 19 nt, synthetic construct
  misc_feature 1..19: note = siRNA antisense sequence
  source 1..19: mol_type = other RNA
acagcatccatgtgaggac

SEQ ID NO: 69034 - RNA, 19 nt, synthetic construct
  misc_feature 1..19: note = siRNA sense sequence
  source 1..19: mol_type = other RNA
tcctcacatggatgctgta

SEQ ID NO: 69035 - RNA, 19 nt, synthetic construct
  misc_feature 1..19: note = siRNA antisense sequence
  source 1..19: mol_type = other RNA
tacagcatccatgtgagga

SEQ ID NO: 69036 - RNA, 19 nt, synthetic construct
  misc_feature 1..19: note = siRNA sense sequence
  source 1..19: mol_type = other RNA
cctcacatggatgctgtat

SEQ ID NO: 69037 - RNA, 19 nt, synthetic construct
  misc_feature 1..19: note = siRNA antisense sequence
  source 1..19: mol_type = other RNA
atacagcatccatgtgagg

SEQ ID NO: 69038 - RNA, 19 nt, synthetic construct
  misc_feature 1..19: note = siRNA sense sequence
  source 1..19: mol_type = other RNA
ctcacatggatgctgtatt

SEQ ID NO: 69039 - RNA, 19 nt, synthetic construct
  misc_feature 1..19: note = siRNA antisense sequence
  source 1..19: mol_type = other RNA
aatacagcatccatgtgag

SEQ ID NO: 69040 - RNA, 19 nt, synthetic construct
  misc_feature 1..19: note = siRNA sense sequence
  source 1..19: mol_type = other RNA
tcacatggatgctgtattt

SEQ ID NO: 69041 - RNA, 19 nt, synthetic construct
  misc_feature 1..19: note = siRNA antisense sequence
  source 1..19: mol_type = other RNA
aaatacagcatccatgtga

SEQ ID NO: 69042 - RNA, 19 nt, synthetic construct
  misc_feature 1..19: note = siRNA sense sequence
  source 1..19: mol_type = other RNA
cacatggatgctgtattta

SEQ ID NO: 69043 - RNA, 19 nt, synthetic construct
  misc_feature 1..19: note = siRNA antisense sequence
  source 1..19: mol_type = other RNA
taaatacagcatccatgtg

SEQ ID NO: 69044 - RNA, 19 nt, synthetic construct
  misc_feature 1..19: note = siRNA sense sequence
  source 1..19: mol_type = other RNA
acatggatgctgtatttat

SEQ ID NO: 69045 - RNA, 19 nt, synthetic construct
  misc_feature 1..19: note = siRNA antisense sequence
  source 1..19: mol_type = other RNA
ataaatacagcatccatgt

SEQ ID NO: 69046 - RNA, 19 nt, synthetic construct
  misc_feature 1..19: note = siRNA sense sequence
  source 1..19: mol_type = other RNA
ggatgctgtatttataact

SEQ ID NO: 69047 - RNA, 19 nt, synthetic construct
  misc_feature 1..19: note = siRNA antisense sequence
  source 1..19: mol_type = other RNA
agttataaatacagcatcc

SEQ ID NO: 69048 - RNA, 19 nt, synthetic construct
  misc_feature 1..19: note = siRNA sense sequence
  source 1..19: mol_type = other RNA
aattctaaatagcaggctt

SEQ ID NO: 69049 - RNA, 19 nt, synthetic construct
  misc_feature 1..19: note = siRNA antisense sequence
  source 1..19: mol_type = other RNA
aagcctgctatttagaatt

SEQ ID NO: 69050 - RNA, 19 nt, synthetic construct
  misc_feature 1..19: note = siRNA sense sequence
  source 1..19: mol_type = other RNA
aatagcaggcttttaaatg

SEQ ID NO: 69051 - RNA, 19 nt, synthetic construct
  misc_feature 1..19: note = siRNA antisense sequence
  source 1..19: mol_type = other RNA
catttaaaagcctgctatt

SEQ ID NO: 69052 - RNA, 19 nt, synthetic construct
  misc_feature 1..19: note = siRNA sense sequence
  source 1..19: mol_type = other RNA
atagcaggcttttaaatgc

SEQ ID NO: 69053 - RNA, 19 nt, synthetic construct
  misc_feature 1..19: note = siRNA antisense sequence
  source 1..19: mol_type = other RNA
gcatttaaaagcctgctat

SEQ ID NO: 69054 - RNA, 19 nt, synthetic construct
  misc_feature 1..19: note = siRNA sense sequence
  source 1..19: mol_type = other RNA
cagcttccaggtgagtcct

SEQ ID NO: 69055 - RNA, 19 nt, synthetic construct
  misc_feature 1..19: note = siRNA antisense sequence
  source 1..19: mol_type = other RNA
aggactcacctggaagctg

SEQ ID NO: 69056 - RNA, 19 nt, synthetic construct
  misc_feature 1..19: note = siRNA sense sequence
  source 1..19: mol_type = other RNA
agcttccaggtgagtcctc

SEQ ID NO: 69057 - RNA, 19 nt, synthetic construct
  misc_feature 1..19: note = siRNA antisense sequence
  source 1..19: mol_type = other RNA
gaggactcacctggaagct

SEQ ID NO: 69058 - RNA, 19 nt, synthetic construct
  misc_feature 1..19: note = siRNA sense sequence
  source 1..19: mol_type = other RNA
gcttccaggtgagtcctct

SEQ ID NO: 69059 - RNA, 19 nt, synthetic construct
  misc_feature 1..19: note = siRNA antisense sequence
  source 1..19: mol_type = other RNA
agaggactcacctggaagc

SEQ ID NO: 69060 - RNA, 19 nt, synthetic construct
  misc_feature 1..19: note = siRNA sense sequence
  source 1..19: mol_type = other RNA
cttccaggtgagtcctctg

SEQ ID NO: 69061 - RNA, 19 nt, synthetic construct
  misc_feature 1..19: note = siRNA antisense sequence
  source 1..19: mol_type = other RNA
cagaggactcacctggaag

SEQ ID NO: 69062 - RNA, 19 nt, synthetic construct
  misc_feature 1..19: note = siRNA sense sequence
  source 1..19: mol_type = other RNA
caggtgagtcctctggctg

SEQ ID NO: 69063 - RNA, 19 nt, synthetic construct
  misc_feature 1..19: note = siRNA antisense sequence
  source 1..19: mol_type = other RNA
cagccagaggactcacctg

SEQ ID NO: 69064 - RNA, 19 nt, synthetic construct
  misc_feature 1..19: note = siRNA sense sequence
  source 1..19: mol_type = other RNA
gtgagtcctctggctgcca

SEQ ID NO: 69065 - RNA, 19 nt, synthetic construct
  misc_feature 1..19: note = siRNA antisense sequence
  source 1..19: mol_type = other RNA
tggcagccagaggactcac

SEQ ID NO: 69066 - RNA, 19 nt, synthetic construct
  misc_feature 1..19: note = siRNA sense sequence
  source 1..19: mol_type = other RNA
acaccaggtattaattgtt

SEQ ID NO: 69067 - RNA, 19 nt, synthetic construct
  misc_feature 1..19: note = siRNA antisense sequence
  source 1..19: mol_type = other RNA
aacaattaatacctggtgt

SEQ ID NO: 69068 - RNA, 19 nt, synthetic construct
  misc_feature 1..19: note = siRNA sense sequence
  source 1..19: mol_type = other RNA
caccaggtattaattgtta

SEQ ID NO: 69069 - RNA, 19 nt, synthetic construct
  misc_feature 1..19: note = siRNA antisense sequence
  source 1..19: mol_type = other RNA
taacaattaatacctggtg

SEQ ID NO: 69070 - RNA, 19 nt, synthetic construct
  misc_feature 1..19: note = siRNA sense sequence
  source 1..19: mol_type = other RNA
aggctaaatgctgctgttt

SEQ ID NO: 69071 - RNA, 19 nt, synthetic construct
  misc_feature 1..19: note = siRNA antisense sequence
  source 1..19: mol_type = other RNA
aaacagcagcatttagcct

SEQ ID NO: 69072 - RNA, 19 nt, synthetic construct
  misc_feature 1..19: note = siRNA sense sequence
  source 1..19: mol_type = other RNA
taaatgctgctgtttctaa

SEQ ID NO: 69073 - RNA, 19 nt, synthetic construct
  misc_feature 1..19: note = siRNA antisense sequence
  source 1..19: mol_type = other RNA
ttagaaacagcagcattta

SEQ ID NO: 69074 - RNA, 19 nt, synthetic construct
  misc_feature 1..19: note = siRNA sense sequence
  source 1..19: mol_type = other RNA
atgctgctgtttctaagtg

SEQ ID NO: 69075 - RNA, 19 nt, synthetic construct
  misc_feature 1..19: note = siRNA antisense sequence
  source 1..19: mol_type = other RNA
cacttagaaacagcagcat

SEQ ID NO: 69076 - RNA, 19 nt, synthetic construct
  misc_feature 1..19: note = siRNA sense sequence
  source 1..19: mol_type = other RNA
tgctgctgtttctaagtgg

SEQ ID NO: 69077 - RNA, 19 nt, synthetic construct
  misc_feature 1..19: note = siRNA antisense sequence
  source 1..19: mol_type = other RNA
ccacttagaaacagcagca

SEQ ID NO: 69078 - RNA, 19 nt, synthetic construct
  misc_feature 1..19: note = siRNA sense sequence
  source 1..19: mol_type = other RNA
gctgctgtttctaagtgga

SEQ ID NO: 69079 - RNA, 19 nt, synthetic construct
  misc_feature 1..19: note = siRNA antisense sequence
  source 1..19: mol_type = other RNA
tccacttagaaacagcagc

SEQ ID NO: 69080 - RNA, 19 nt, synthetic construct
  misc_feature 1..19: note = siRNA sense sequence
  source 1..19: mol_type = other RNA
gctgtttctaagtggaagc

SEQ ID NO: 69081 - RNA, 19 nt, synthetic construct
  misc_feature 1..19: note = siRNA antisense sequence
  source 1..19: mol_type = other RNA
gcttccacttagaaacagc

SEQ ID NO: 69082 - RNA, 19 nt, synthetic construct
  misc_feature 1..19: note = siRNA sense sequence
  source 1..19: mol_type = other RNA
ctgtttctaagtggaagca

SEQ ID NO: 69083 - RNA, 19 nt, synthetic construct
  misc_feature 1..19: note = siRNA antisense sequence
  source 1..19: mol_type = other RNA
tgcttccacttagaaacag

SEQ ID NO: 69084 - RNA, 19 nt, synthetic construct
  misc_feature 1..19: note = siRNA sense sequence
  source 1..19: mol_type = other RNA
acactcttaggtggaataa

SEQ ID NO: 69085 - RNA, 19 nt, synthetic construct
  misc_feature 1..19: note = siRNA antisense sequence
  source 1..19: mol_type = other RNA
ttattccacctaagagtgt

SEQ ID NO: 69086 - RNA, 19 nt, synthetic construct
  misc_feature 1..19: note = siRNA sense sequence
  source 1..19: mol_type = other RNA
gcatctttgatcctcaggt

SEQ ID NO: 69087 - RNA, 19 nt, synthetic construct
  misc_feature 1..19: note = siRNA antisense sequence
  source 1..19: mol_type = other RNA
acctgaggatcaaagatgc

SEQ ID NO: 69088 - RNA, 19 nt, synthetic construct
  misc_feature 1..19: note = siRNA sense sequence
  source 1..19: mol_type = other RNA
tgatcctcaggttaaaatt

SEQ ID NO: 69089 - RNA, 19 nt, synthetic construct
  misc_feature 1..19: note = siRNA antisense sequence
  source 1..19: mol_type = other RNA
aattttaacctgaggatca

SEQ ID NO: 69090 - RNA, 19 nt, synthetic construct
  misc_feature 1..19: note = siRNA sense sequence
  source 1..19: mol_type = other RNA
gatcctcaggttaaaattt

SEQ ID NO: 69091 - RNA, 19 nt, synthetic construct
  misc_feature 1..19: note = siRNA antisense sequence
  source 1..19: mol_type = other RNA
aaattttaacctgaggatc

SEQ ID NO: 69092 - RNA, 19 nt, synthetic construct
  misc_feature 1..19: note = siRNA sense sequence
  source 1..19: mol_type = other RNA
taaccattaaccttgagga

SEQ ID NO: 69093 - RNA, 19 nt, synthetic construct
  misc_feature 1..19: note = siRNA antisense sequence
  source 1..19: mol_type = other RNA
tcctcaaggttaatggtta

SEQ ID NO: 69094 - RNA, 19 nt, synthetic construct
  misc_feature 1..19: note = siRNA sense sequence
  source 1..19: mol_type = other RNA
aaatgtgaagtagcatctg

SEQ ID NO: 69095 - RNA, 19 nt, synthetic construct
  misc_feature 1..19: note = siRNA antisense sequence
  source 1..19: mol_type = other RNA
cagatgctacttcacattt

SEQ ID NO: 69096 - RNA, 19 nt, synthetic construct
  misc_feature 1..19: note = siRNA sense sequence
  source 1..19: mol_type = other RNA
aagtagcatctggagtctc

SEQ ID NO: 69097 - RNA, 19 nt, synthetic construct
  misc_feature 1..19: note = siRNA antisense sequence
  source 1..19: mol_type = other RNA
gagactccagatgctactt

SEQ ID NO: 69098 - RNA, 19 nt, synthetic construct
  misc_feature 1..19: note = siRNA sense sequence
  source 1..19: mol_type = other RNA
agtagcatctggagtctct

SEQ ID NO: 69099 - RNA, 19 nt, synthetic construct
  misc_feature 1..19: note = siRNA antisense sequence
  source 1..19: mol_type = other RNA
agagactccagatgctact

SEQ ID NO: 69100 - RNA, 19 nt, synthetic construct
  misc_feature 1..19: note = siRNA sense sequence
  source 1..19: mol_type = other RNA
gtagcatctggagtctctt

SEQ ID NO: 69101 - RNA, 19 nt, synthetic construct
  misc_feature 1..19: note = siRNA antisense sequence
  source 1..19: mol_type = other RNA
aagagactccagatgctac

SEQ ID NO: 69102 - RNA, 19 nt, synthetic construct
  misc_feature 1..19: note = siRNA sense sequence
  source 1..19: mol_type = other RNA
tagcatctggagtctctta

SEQ ID NO: 69103 - RNA, 19 nt, synthetic construct
  misc_feature 1..19: note = siRNA antisense sequence
  source 1..19: mol_type = other RNA
taagagactccagatgcta

SEQ ID NO: 69104 - RNA, 19 nt, synthetic construct
  misc_feature 1..19: note = siRNA sense sequence
  source 1..19: mol_type = other RNA
agcatctggagtctcttaa

SEQ ID NO: 69105 - RNA, 19 nt, synthetic construct
  misc_feature 1..19: note = siRNA antisense sequence
  source 1..19: mol_type = other RNA
ttaagagactccagatgct

SEQ ID NO: 69106 - RNA, 19 nt, synthetic construct
  misc_feature 1..19: note = siRNA sense sequence
  source 1..19: mol_type = other RNA
gcatctggagtctcttaag

SEQ ID NO: 69107 - RNA, 19 nt, synthetic construct
  misc_feature 1..19: note = siRNA antisense sequence
  source 1..19: mol_type = other RNA
cttaagagactccagatgc

SEQ ID NO: 69108 - RNA, 19 nt, synthetic construct
  misc_feature 1..19: note = siRNA sense sequence
  source 1..19: mol_type = other RNA
catctggagtctcttaagc

SEQ ID NO: 69109 - RNA, 19 nt, synthetic construct
  misc_feature 1..19: note = siRNA antisense sequence
  source 1..19: mol_type = other RNA
gcttaagagactccagatg

SEQ ID NO: 69110 - RNA, 19 nt, synthetic construct
  misc_feature 1..19: note = siRNA sense sequence
  source 1..19: mol_type = other RNA
atctggagtctcttaagcc

SEQ ID NO: 69111 - RNA, 19 nt, synthetic construct
  misc_feature 1..19: note = siRNA antisense sequence
  source 1..19: mol_type = other RNA
ggcttaagagactccagat

SEQ ID NO: 69112 - RNA, 19 nt, synthetic construct
  misc_feature 1..19: note = siRNA sense sequence
  source 1..19: mol_type = other RNA
tacagcatctccacccagg

SEQ ID NO: 69113 - RNA, 19 nt, synthetic construct
  misc_feature 1..19: note = siRNA antisense sequence
  source 1..19: mol_type = other RNA
cctgggtggagatgctgta

SEQ ID NO: 69114 - RNA, 19 nt, synthetic construct
  misc_feature 1..19: note = siRNA sense sequence
  source 1..19: mol_type = other RNA
acagcatctccacccagga

SEQ ID NO: 69115 - RNA, 19 nt, synthetic construct
  misc_feature 1..19: note = siRNA antisense sequence
  source 1..19: mol_type = other RNA
tcctgggtggagatgctgt

SEQ ID NO: 69116 - RNA, 19 nt, synthetic construct
  misc_feature 1..19: note = siRNA sense sequence
  source 1..19: mol_type = other RNA
cagcatctccacccaggaa

SEQ ID NO: 69117 - RNA, 19 nt, synthetic construct
  misc_feature 1..19: note = siRNA antisense sequence
  source 1..19: mol_type = other RNA
ttcctgggtggagatgctg

SEQ ID NO: 69118 - RNA, 19 nt, synthetic construct
  misc_feature 1..19: note = siRNA sense sequence
  source 1..19: mol_type = other RNA
atctccacccaggaagtcc

SEQ ID NO: 69119 - RNA, 19 nt, synthetic construct
  misc_feature 1..19: note = siRNA antisense sequence
  source 1..19: mol_type = other RNA
ggacttcctgggtggagat

SEQ ID NO: 69120 - RNA, 19 nt, synthetic construct
  misc_feature 1..19: note = siRNA sense sequence
  source 1..19: mol_type = other RNA
tcctaactaatgggaatgg

SEQ ID NO: 69121 - RNA, 19 nt, synthetic construct
  misc_feature 1..19: note = siRNA antisense sequence
  source 1..19: mol_type = other RNA
ccattcccattagttagga

SEQ ID NO: 69122 - RNA, 19 nt, synthetic construct
  misc_feature 1..19: note = siRNA sense sequence
  source 1..19: mol_type = other RNA
cctaactaatgggaatgga

SEQ ID NO: 69123 - RNA, 19 nt, synthetic construct
  misc_feature 1..19: note = siRNA antisense sequence
  source 1..19: mol_type = other RNA
tccattcccattagttagg

SEQ ID NO: 69124 - RNA, 19 nt, synthetic construct
  misc_feature 1..19: note = siRNA sense sequence
  source 1..19: mol_type = other RNA
ctaactaatgggaatggat

SEQ ID NO: 69125 - RNA, 19 nt, synthetic construct
  misc_feature 1..19: note = siRNA antisense sequence
  source 1..19: mol_type = other RNA
atccattcccattagttag

SEQ ID NO: 69126 - RNA, 19 nt, synthetic construct
  misc_feature 1..19: note = siRNA sense sequence
  source 1..19: mol_type = other RNA
taactaatgggaatggatc

SEQ ID NO: 69127 - RNA, 19 nt, synthetic construct
  misc_feature 1..19: note = siRNA antisense sequence
  source 1..19: mol_type = other RNA
gatccattcccattagtta

SEQ ID NO: 69128 - RNA, 19 nt, synthetic construct
  misc_feature 1..19: note = siRNA sense sequence
  source 1..19: mol_type = other RNA
aactaatgggaatggatcc

SEQ ID NO: 69129 - RNA, 19 nt, synthetic construct
  misc_feature 1..19: note = siRNA antisense sequence
  source 1..19: mol_type = other RNA
ggatccattcccattagtt

SEQ ID NO: 69130 - RNA, 19 nt, synthetic construct
  misc_feature 1..19: note = siRNA sense sequence
  source 1..19: mol_type = other RNA
actaatgggaatggatcct

SEQ ID NO: 69131 - RNA, 19 nt, synthetic construct
  misc_feature 1..19: note = siRNA antisense sequence
  source 1..19: mol_type = other RNA
aggatccattcccattagt

SEQ ID NO: 69132 - RNA, 19 nt, synthetic construct
  misc_feature 1..19: note = siRNA sense sequence
  source 1..19: mol_type = other RNA
ctaatgggaatggatcctt

SEQ ID NO: 69133 - RNA, 19 nt, synthetic construct
  misc_feature 1..19: note = siRNA antisense sequence
  source 1..19: mol_type = other RNA
aaggatccattcccattag

SEQ ID NO: 69134 - RNA, 19 nt, synthetic construct
  misc_feature 1..19: note = siRNA sense sequence
  source 1..19: mol_type = other RNA
taatgggaatggatccttt

SEQ ID NO: 69135 - RNA, 19 nt, synthetic construct
  misc_feature 1..19: note = siRNA antisense sequence
  source 1..19: mol_type = other RNA
aaaggatccattcccatta

SEQ ID NO: 69136 - RNA, 19 nt, synthetic construct
  misc_feature 1..19: note = siRNA sense sequence
  source 1..19: mol_type = other RNA
aatgggaatggatcctttt

SEQ ID NO: 69137 - RNA, 19 nt, synthetic construct
  misc_feature 1..19: note = siRNA antisense sequence
  source 1..19: mol_type = other RNA
aaaaggatccattcccatt

SEQ ID NO: 69138 - RNA, 19 nt, synthetic construct
  misc_feature 1..19: note = siRNA sense sequence
  source 1..19: mol_type = other RNA
atgggaatggatccttttc

SEQ ID NO: 69139 - RNA, 19 nt, synthetic construct
  misc_feature 1..19: note = siRNA antisense sequence
  source 1..19: mol_type = other RNA
gaaaaggatccattcccat

SEQ ID NO: 69140 - RNA, 19 nt, synthetic construct
  misc_feature 1..19: note = siRNA sense sequence
  source 1..19: mol_type = other RNA
tttcccattataaagggcc

SEQ ID NO: 69141 - RNA, 19 nt, synthetic construct
  misc_feature 1..19: note = siRNA antisense sequence
  source 1..19: mol_type = other RNA
ggccctttataatgggaaa

SEQ ID NO: 69142 - RNA, 19 nt, synthetic construct
  misc_feature 1..19: note = siRNA sense sequence
  source 1..19: mol_type = other RNA
gccgatgcttaacccttga

SEQ ID NO: 69143 - RNA, 19 nt, synthetic construct
  misc_feature 1..19: note = siRNA antisense sequence
  source 1..19: mol_type = other RNA
tcaagggttaagcatcggc

SEQ ID NO: 69144 - RNA, 19 nt, synthetic construct
  misc_feature 1..19: note = siRNA sense sequence
  source 1..19: mol_type = other RNA
ccgatgcttaacccttgaa

SEQ ID NO: 69145 - RNA, 19 nt, synthetic construct
  misc_feature 1..19: note = siRNA antisense sequence
  source 1..19: mol_type = other RNA
ttcaagggttaagcatcgg

SEQ ID NO: 69146 - RNA, 19 nt, synthetic construct
  misc_feature 1..19: note = siRNA sense sequence
  source 1..19: mol_type = other RNA
aacccactactgttcttat

SEQ ID NO: 69147 - RNA, 19 nt, synthetic construct
  misc_feature 1..19: note = siRNA antisense sequence
  source 1..19: mol_type = other RNA
ataagaacagtagtgggtt

SEQ ID NO: 69148 - RNA, 19 nt, synthetic construct
  misc_feature 1..19: note = siRNA sense sequence
  source 1..19: mol_type = other RNA
acccactactgttcttatg

SEQ ID NO: 69149 - RNA, 19 nt, synthetic construct
  misc_feature 1..19: note = siRNA antisense sequence
  source 1..19: mol_type = other RNA
cataagaacagtagtgggt

SEQ ID NO: 69150 - RNA, 19 nt, synthetic construct
  misc_feature 1..19: note = siRNA sense sequence
  source 1..19: mol_type = other RNA
cccactactgttcttatgc

SEQ ID NO: 69151 - RNA, 19 nt, synthetic construct
  misc_feature 1..19: note = siRNA antisense sequence
  source 1..19: mol_type = other RNA
gcataagaacagtagtggg

SEQ ID NO: 69152 - RNA, 19 nt, synthetic construct
  misc_feature 1..19: note = siRNA sense sequence
  source 1..19: mol_type = other RNA
ccactactgttcttatgcc

SEQ ID NO: 69153 - RNA, 19 nt, synthetic construct
  misc_feature 1..19: note = siRNA antisense sequence
  source 1..19: mol_type = other RNA
ggcataagaacagtagtgg

SEQ ID NO: 69154 - RNA, 19 nt, synthetic construct
  misc_feature 1..19: note = siRNA sense sequence
  source 1..19: mol_type = other RNA
cactactgttcttatgccc

SEQ ID NO: 69155 - RNA, 19 nt, synthetic construct
  misc_feature 1..19: note = siRNA antisense sequence
  source 1..19: mol_type = other RNA
gggcataagaacagtagtg

SEQ ID NO: 69156 - RNA, 19 nt, synthetic construct
  misc_feature 1..19: note = siRNA sense sequence
  source 1..19: mol_type = other RNA
ccaagatctgcaccttaca

SEQ ID NO: 69157 - RNA, 19 nt, synthetic construct
  misc_feature 1..19: note = siRNA antisense sequence
  source 1..19: mol_type = other RNA
tgtaaggtgcagatcttgg

SEQ ID NO: 69158 - RNA, 19 nt, synthetic construct
  misc_feature 1..19: note = siRNA sense sequence
  source 1..19: mol_type = other RNA
caccttacatcaggcaccc

SEQ ID NO: 69159 - RNA, 19 nt, synthetic construct
  misc_feature 1..19: note = siRNA antisense sequence
  source 1..19: mol_type = other RNA
gggtgcctgatgtaaggtg

SEQ ID NO: 69160 - RNA, 19 nt, synthetic construct
  misc_feature 1..19: note = siRNA sense sequence
  source 1..19: mol_type = other RNA
accttacatcaggcacccg

SEQ ID NO: 69161 - RNA, 19 nt, synthetic construct
  misc_feature 1..19: note = siRNA antisense sequence
  source 1..19: mol_type = other RNA
cgggtgcctgatgtaaggt

SEQ ID NO: 69162 - RNA, 19 nt, synthetic construct
  misc_feature 1..19: note = siRNA sense sequence
  source 1..19: mol_type = other RNA
ccttacatcaggcacccgg

SEQ ID NO: 69163 - RNA, 19 nt, synthetic construct
  misc_feature 1..19: note = siRNA antisense sequence
  source 1..19: mol_type = other RNA
ccgggtgcctgatgtaagg

SEQ ID NO: 69164 - RNA, 19 nt, synthetic construct
  misc_feature 1..19: note = siRNA sense sequence
  source 1..19: mol_type = other RNA
aaaatatgtaagggtgact

SEQ ID NO: 69165 - RNA, 19 nt, synthetic construct
  misc_feature 1..19: note = siRNA antisense sequence
  source 1..19: mol_type = other RNA
agtcacccttacatatttt

SEQ ID NO: 69166 - RNA, 19 nt, synthetic construct
  misc_feature 1..19: note = siRNA sense sequence
  source 1..19: mol_type = other RNA
aaatatgtaagggtgactc

SEQ ID NO: 69167 - RNA, 19 nt, synthetic construct
  misc_feature 1..19: note = siRNA antisense sequence
  source 1..19: mol_type = other RNA
gagtcacccttacatattt

SEQ ID NO: 69168 - RNA, 19 nt, synthetic construct
  misc_feature 1..19: note = siRNA sense sequence
  source 1..19: mol_type = other RNA
aatatgtaagggtgactca

SEQ ID NO: 69169 - RNA, 19 nt, synthetic construct
  misc_feature 1..19: note = siRNA antisense sequence
  source 1..19: mol_type = other RNA
tgagtcacccttacatatt

SEQ ID NO: 69170 - RNA, 19 nt, synthetic construct
  misc_feature 1..19: note = siRNA sense sequence
  source 1..19: mol_type = other RNA
atatgtaagggtgactcat

SEQ ID NO: 69171 - RNA, 19 nt, synthetic construct
  misc_feature 1..19: note = siRNA antisense sequence
  source 1..19: mol_type = other RNA
atgagtcacccttacatat

SEQ ID NO: 69172 - RNA, 19 nt, synthetic construct
  misc_feature 1..19: note = siRNA sense sequence
  source 1..19: mol_type = other RNA
tatgtaagggtgactcatc

SEQ ID NO: 69173 - RNA, 19 nt, synthetic construct
  misc_feature 1..19: note = siRNA antisense sequence
  source 1..19: mol_type = other RNA
gatgagtcacccttacata

SEQ ID NO: 69174 - RNA, 19 nt, synthetic construct
  misc_feature 1..19: note = siRNA sense sequence
  source 1..19: mol_type = other RNA
atgtaagggtgactcatca

SEQ ID NO: 69175 - RNA, 19 nt, synthetic construct
  misc_feature 1..19: note = siRNA antisense sequence
  source 1..19: mol_type = other RNA
tgatgagtcacccttacat

SEQ ID NO: 69176 - RNA, 19 nt, synthetic construct
  misc_feature 1..19: note = siRNA sense sequence
  source 1..19: mol_type = other RNA
cctaactttggactccttg

SEQ ID NO: 69177 - RNA, 19 nt, synthetic construct
  misc_feature 1..19: note = siRNA antisense sequence
  source 1..19: mol_type = other RNA
caaggagtccaaagttagg

SEQ ID NO: 69178 - RNA, 19 nt, synthetic construct
  misc_feature 1..19: note = siRNA sense sequence
  source 1..19: mol_type = other RNA
actttggactccttgcttt

SEQ ID NO: 69179 - RNA, 19 nt, synthetic construct
  misc_feature 1..19: note = siRNA antisense sequence
  source 1..19: mol_type = other RNA
aaagcaaggagtccaaagt

SEQ ID NO: 69180 - RNA, 19 nt, synthetic construct
  misc_feature 1..19: note = siRNA sense sequence
  source 1..19: mol_type = other RNA
tctctctctttacatatag

SEQ ID NO: 69181 - RNA, 19 nt, synthetic construct
  misc_feature 1..19: note = siRNA antisense sequence
  source 1..19: mol_type = other RNA
ctatatgtaaagagagaga

SEQ ID NO: 69182 - RNA, 19 nt, synthetic construct
  misc_feature 1..19: note = siRNA sense sequence
  source 1..19: mol_type = other RNA
ctctctctttacatatagc

SEQ ID NO: 69183 - RNA, 19 nt, synthetic construct
  misc_feature 1..19: note = siRNA antisense sequence
  source 1..19: mol_type = other RNA
gctatatgtaaagagagag

SEQ ID NO: 69184 - RNA, 19 nt, synthetic construct
  misc_feature 1..19: note = siRNA sense sequence
  source 1..19: mol_type = other RNA
tctctctttacatatagca

SEQ ID NO: 69185 - RNA, 19 nt, synthetic construct
  misc_feature 1..19: note = siRNA antisense sequence
  source 1..19: mol_type = other RNA
tgctatatgtaaagagaga

SEQ ID NO: 69186 - RNA, 19 nt, synthetic construct
  misc_feature 1..19: note = siRNA sense sequence
  source 1..19: mol_type = other RNA
ctctctttacatatagcaa

SEQ ID NO: 69187 - RNA, 19 nt, synthetic construct
  misc_feature 1..19: note = siRNA antisense sequence
  source 1..19: mol_type = other RNA
ttgctatatgtaaagagag

SEQ ID NO: 69188 - RNA, 19 nt, synthetic construct
  misc_feature 1..19: note = siRNA sense sequence
  source 1..19: mol_type = other RNA
agtagctgatgaatttaga

SEQ ID NO: 69189 - RNA, 19 nt, synthetic construct
  misc_feature 1..19: note = siRNA antisense sequence
  source 1..19: mol_type = other RNA
tctaaattcatcagctact

SEQ ID NO: 69190 - RNA, 19 nt, synthetic construct
  misc_feature 1..19: note = siRNA sense sequence
  source 1..19: mol_type = other RNA
gtagctgatgaatttagaa

SEQ ID NO: 69191 - RNA, 19 nt, synthetic construct
  misc_feature 1..19: note = siRNA antisense sequence
  source 1..19: mol_type = other RNA
ttctaaattcatcagctac

SEQ ID NO: 69192 - RNA, 19 nt, synthetic construct
  misc_feature 1..19: note = siRNA sense sequence
  source 1..19: mol_type = other RNA
caagactccctagcatttt

SEQ ID NO: 69193 - RNA, 19 nt, synthetic construct
  misc_feature 1..19: note = siRNA antisense sequence
  source 1..19: mol_type = other RNA
aaaatgctagggagtcttg

SEQ ID NO: 69194 - RNA, 19 nt, synthetic construct
  misc_feature 1..19: note = siRNA sense sequence
  source 1..19: mol_type = other RNA
aagactccctagcattttc

SEQ ID NO: 69195 - RNA, 19 nt, synthetic construct
  misc_feature 1..19: note = siRNA antisense sequence
  source 1..19: mol_type = other RNA
gaaaatgctagggagtctt

SEQ ID NO: 69196 - RNA, 19 nt, synthetic construct
  misc_feature 1..19: note = siRNA sense sequence
  source 1..19: mol_type = other RNA
tttcctcctcccacaggct

SEQ ID NO: 69197 - RNA, 19 nt, synthetic construct
  misc_feature 1..19: note = siRNA antisense sequence
  source 1..19: mol_type = other RNA
agcctgtgggaggaggaaa

SEQ ID NO: 69198 - RNA, 19 nt, synthetic construct
  misc_feature 1..19: note = siRNA sense sequence
  source 1..19: mol_type = other RNA
ttcctcctcccacaggctg

SEQ ID NO: 69199 - RNA, 19 nt, synthetic construct
  misc_feature 1..19: note = siRNA antisense sequence
  source 1..19: mol_type = other RNA
cagcctgtgggaggaggaa

SEQ ID NO: 69200 - RNA, 19 nt, synthetic construct
  misc_feature 1..19: note = siRNA sense sequence
  source 1..19: mol_type = other RNA
agactgggcagtaggagcc

SEQ ID NO: 69201 - RNA, 19 nt, synthetic construct
  misc_feature 1..19: note = siRNA antisense sequence
  source 1..19: mol_type = other RNA
ggctcctactgcccagtct

SEQ ID NO: 69202 - RNA, 19 nt, synthetic construct
  misc_feature 1..19: note = siRNA sense sequence
  source 1..19: mol_type = other RNA
gactgggcagtaggagcca

SEQ ID NO: 69203 - RNA, 19 nt, synthetic construct
  misc_feature 1..19: note = siRNA antisense sequence
  source 1..19: mol_type = other RNA
tggctcctactgcccagtc

SEQ ID NO: 69204 - RNA, 19 nt, synthetic construct
  misc_feature 1..19: note = siRNA sense sequence
  source 1..19: mol_type = other RNA
agtaggagccagagccaat

SEQ ID NO: 69205 - RNA, 19 nt, synthetic construct
  misc_feature 1..19: note = siRNA antisense sequence
  source 1..19: mol_type = other RNA
attggctctggctcctact

SEQ ID NO: 69206 - RNA, 19 nt, synthetic construct
  misc_feature 1..19: note = siRNA sense sequence
  source 1..19: mol_type = other RNA
gtaggagccagagccaatt

SEQ ID NO: 69207 - RNA, 19 nt, synthetic construct
  misc_feature 1..19: note = siRNA antisense sequence
  source 1..19: mol_type = other RNA
aattggctctggctcctac

SEQ ID NO: 69208 - RNA, 19 nt, synthetic construct
  misc_feature 1..19: note = siRNA sense sequence
  source 1..19: mol_type = other RNA
taggagccagagccaattt

SEQ ID NO: 69209 - RNA, 19 nt, synthetic construct
  misc_feature 1..19: note = siRNA antisense sequence
  source 1..19: mol_type = other RNA
aaattggctctggctccta

SEQ ID NO: 69210 - RNA, 19 nt, synthetic construct
  misc_feature 1..19: note = siRNA sense sequence
  source 1..19: mol_type = other RNA
aggagccagagccaatttg

SEQ ID NO: 69211 - RNA, 19 nt, synthetic construct
  misc_feature 1..19: note = siRNA antisense sequence
  source 1..19: mol_type = other RNA
caaattggctctggctcct

SEQ ID NO: 69212 - RNA, 19 nt, synthetic construct
  misc_feature 1..19: note = siRNA sense sequence
  source 1..19: mol_type = other RNA
ggagccagagccaatttgc

SEQ ID NO: 69213 - RNA, 19 nt, synthetic construct
  misc_feature 1..19: note = siRNA antisense sequence
  source 1..19: mol_type = other RNA
gcaaattggctctggctcc

SEQ ID NO: 69214 - RNA, 19 nt, synthetic construct
  misc_feature 1..19: note = siRNA sense sequence
  source 1..19: mol_type = other RNA
gccagagccaatttgcagg

SEQ ID NO: 69215 - RNA, 19 nt, synthetic construct
  misc_feature 1..19: note = siRNA antisense sequence
  source 1..19: mol_type = other RNA
cctgcaaattggctctggc

SEQ ID NO: 69216 - RNA, 19 nt, synthetic construct
  misc_feature 1..19: note = siRNA sense sequence
  source 1..19: mol_type = other RNA
ccagagccaatttgcagga

SEQ ID NO: 69217 - RNA, 19 nt, synthetic construct
  misc_feature 1..19: note = siRNA antisense sequence
  source 1..19: mol_type = other RNA
tcctgcaaattggctctgg

SEQ ID NO: 69218 - RNA, 19 nt, synthetic construct
  misc_feature 1..19: note = siRNA sense sequence
  source 1..19: mol_type = other RNA
agagccaatttgcaggatc

SEQ ID NO: 69219 - RNA, 19 nt, synthetic construct
  misc_feature 1..19: note = siRNA antisense sequence
  source 1..19: mol_type = other RNA
gatcctgcaaattggctct

SEQ ID NO: 69220 - RNA, 19 nt, synthetic construct
  misc_feature 1..19: note = siRNA sense sequence
  source 1..19: mol_type = other RNA
gagccaatttgcaggatct

SEQ ID NO: 69221 - RNA, 19 nt, synthetic construct
  misc_feature 1..19: note = siRNA antisense sequence
  source 1..19: mol_type = other RNA
agatcctgcaaattggctc

SEQ ID NO: 69222 - RNA, 19 nt, synthetic construct
  misc_feature 1..19: note = siRNA sense sequence
  source 1..19: mol_type = other RNA
agccaatttgcaggatctc

SEQ ID NO: 69223 - RNA, 19 nt, synthetic construct
  misc_feature 1..19: note = siRNA antisense sequence
  source 1..19: mol_type = other RNA
gagatcctgcaaattggct

SEQ ID NO: 69224 - RNA, 19 nt, synthetic construct
  misc_feature 1..19: note = siRNA sense sequence
  source 1..19: mol_type = other RNA
gccaatttgcaggatctct

SEQ ID NO: 69225 - RNA, 19 nt, synthetic construct
  misc_feature 1..19: note = siRNA antisense sequence
  source 1..19: mol_type = other RNA
agagatcctgcaaattggc

SEQ ID NO: 69226 - RNA, 19 nt, synthetic construct
  misc_feature 1..19: note = siRNA sense sequence
  source 1..19: mol_type = other RNA
ccaatttgcaggatctctt

SEQ ID NO: 69227 - RNA, 19 nt, synthetic construct
  misc_feature 1..19: note = siRNA antisense sequence
  source 1..19: mol_type = other RNA
aagagatcctgcaaattgg

SEQ ID NO: 69228 - RNA, 19 nt, synthetic construct
  misc_feature 1..19: note = siRNA sense sequence
  source 1..19: mol_type = other RNA
caatttgcaggatctcttt

SEQ ID NO: 69229 - RNA, 19 nt, synthetic construct
  misc_feature 1..19: note = siRNA antisense sequence
  source 1..19: mol_type = other RNA
aaagagatcctgcaaattg

SEQ ID NO: 69230 - RNA, 19 nt, synthetic construct
  misc_feature 1..19: note = siRNA sense sequence
  source 1..19: mol_type = other RNA
aatttgcaggatctctttt

SEQ ID NO: 69231 - RNA, 19 nt, synthetic construct
  misc_feature 1..19: note = siRNA antisense sequence
  source 1..19: mol_type = other RNA
aaaagagatcctgcaaatt

SEQ ID NO: 69232 - RNA, 19 nt, synthetic construct
  misc_feature 1..19: note = siRNA sense sequence
  source 1..19: mol_type = other RNA
atttgcaggatctcttttc

SEQ ID NO: 69233 - RNA, 19 nt, synthetic construct
  misc_feature 1..19: note = siRNA antisense sequence
  source 1..19: mol_type = other RNA
gaaaagagatcctgcaaat

SEQ ID NO: 69234 - RNA, 19 nt, synthetic construct
  misc_feature 1..19: note = siRNA sense sequence
  source 1..19: mol_type = other RNA
tttgcaggatctcttttcc

SEQ ID NO: 69235 - RNA, 19 nt, synthetic construct
  misc_feature 1..19: note = siRNA antisense sequence
  source 1..19: mol_type = other RNA
ggaaaagagatcctgcaaa

SEQ ID NO: 69236 - RNA, 19 nt, synthetic construct
  misc_feature 1..19: note = siRNA sense sequence
  source 1..19: mol_type = other RNA
gatctcttttccttctgcc

SEQ ID NO: 69237 - RNA, 19 nt, synthetic construct
  misc_feature 1..19: note = siRNA antisense sequence
  source 1..19: mol_type = other RNA
ggcagaaggaaaagagatc

SEQ ID NO: 69238 - RNA, 19 nt, synthetic construct
  misc_feature 1..19: note = siRNA sense sequence
  source 1..19: mol_type = other RNA
tttccttctgccttccagt

SEQ ID NO: 69239 - RNA, 19 nt, synthetic construct
  misc_feature 1..19: note = siRNA antisense sequence
  source 1..19: mol_type = other RNA
actggaaggcagaaggaaa

SEQ ID NO: 69240 - RNA, 19 nt, synthetic construct
  misc_feature 1..19: note = siRNA sense sequence
  source 1..19: mol_type = other RNA
ttccttctgccttccagtt

SEQ ID NO: 69241 - RNA, 19 nt, synthetic construct
  misc_feature 1..19: note = siRNA antisense sequence
  source 1..19: mol_type = other RNA
aactggaaggcagaaggaa

SEQ ID NO: 69242 - RNA, 19 nt, synthetic construct
  misc_feature 1..19: note = siRNA sense sequence
  source 1..19: mol_type = other RNA
tccttctgccttccagttg

SEQ ID NO: 69243 - RNA, 19 nt, synthetic construct
  misc_feature 1..19: note = siRNA antisense sequence
  source 1..19: mol_type = other RNA
caactggaaggcagaagga

SEQ ID NO: 69244 - RNA, 19 nt, synthetic construct
  misc_feature 1..19: note = siRNA sense sequence
  source 1..19: mol_type = other RNA
ccttctgccttccagttgg

SEQ ID NO: 69245 - RNA, 19 nt, synthetic construct
  misc_feature 1..19: note = siRNA antisense sequence
  source 1..19: mol_type = other RNA
ccaactggaaggcagaagg

SEQ ID NO: 69246 - RNA, 19 nt, synthetic construct
  misc_feature 1..19: note = siRNA sense sequence
  source 1..19: mol_type = other RNA
ttctgccttccagttggct

SEQ ID NO: 69247 - RNA, 19 nt, synthetic construct
  misc_feature 1..19: note = siRNA antisense sequence
  source 1..19: mol_type = other RNA
agccaactggaaggcagaa

SEQ ID NO: 69248 - RNA, 19 nt, synthetic construct
  misc_feature 1..19: note = siRNA sense sequence
  source 1..19: mol_type = other RNA
tctgccttccagttggctt

SEQ ID NO: 69249 - RNA, 19 nt, synthetic construct
  misc_feature 1..19: note = siRNA antisense sequence
  source 1..19: mol_type = other RNA
aagccaactggaaggcaga

SEQ ID NO: 69250 - RNA, 19 nt, synthetic construct
  misc_feature 1..19: note = siRNA sense sequence
  source 1..19: mol_type = other RNA
tgccttccagttggcttct

SEQ ID NO: 69251 - RNA, 19 nt, synthetic construct
  misc_feature 1..19: note = siRNA antisense sequence
  source 1..19: mol_type = other RNA
agaagccaactggaaggca

SEQ ID NO: 69252 - RNA, 19 nt, synthetic construct
  misc_feature 1..19: note = siRNA sense sequence
  source 1..19: mol_type = other RNA
gccttccagttggcttctc

SEQ ID NO: 69253 - RNA, 19 nt, synthetic construct
  misc_feature 1..19: note = siRNA antisense sequence
  source 1..19: mol_type = other RNA
gagaagccaactggaaggc

SEQ ID NO: 69254 - RNA, 19 nt, synthetic construct
  misc_feature 1..19: note = siRNA sense sequence
  source 1..19: mol_type = other RNA
ttccagttggcttctcttc

SEQ ID NO: 69255 - RNA, 19 nt, synthetic construct
  misc_feature 1..19: note = siRNA antisense sequence
  source 1..19: mol_type = other RNA
gaagagaagccaactggaa

SEQ ID NO: 69256 - RNA, 19 nt, synthetic construct
  misc_feature 1..19: note = siRNA sense sequence
  source 1..19: mol_type = other RNA
tccagttggcttctcttct

SEQ ID NO: 69257 - RNA, 19 nt, synthetic construct
  misc_feature 1..19: note = siRNA antisense sequence
  source 1..19: mol_type = other RNA
agaagagaagccaactgga

SEQ ID NO: 69258 - RNA, 19 nt, synthetic construct
  misc_feature 1..19: note = siRNA sense sequence
  source 1..19: mol_type = other RNA
ccagttggcttctcttctc

SEQ ID NO: 69259 - RNA, 19 nt, synthetic construct
  misc_feature 1..19: note = siRNA antisense sequence
  source 1..19: mol_type = other RNA
gagaagagaagccaactgg

SEQ ID NO: 69260 - RNA, 19 nt, synthetic construct
  misc_feature 1..19: note = siRNA sense sequence
  source 1..19: mol_type = other RNA
cagttggcttctcttctca

SEQ ID NO: 69261 - RNA, 19 nt, synthetic construct
  misc_feature 1..19: note = siRNA antisense sequence
  source 1..19: mol_type = other RNA
tgagaagagaagccaactg

SEQ ID NO: 69262 - RNA, 19 nt, synthetic construct
  misc_feature 1..19: note = siRNA sense sequence
  source 1..19: mol_type = other RNA
agttggcttctcttctcag

SEQ ID NO: 69263 - RNA, 19 nt, synthetic construct
  misc_feature 1..19: note = siRNA antisense sequence
  source 1..19: mol_type = other RNA
ctgagaagagaagccaact

SEQ ID NO: 69264 - RNA, 19 nt, synthetic construct
  misc_feature 1..19: note = siRNA sense sequence
  source 1..19: mol_type = other RNA
ggcttctcttctcagctgc

SEQ ID NO: 69265 - RNA, 19 nt, synthetic construct
  misc_feature 1..19: note = siRNA antisense sequence
  source 1..19: mol_type = other RNA
gcagctgagaagagaagcc

SEQ ID NO: 69266 - RNA, 19 nt, synthetic construct
  misc_feature 1..19: note = siRNA sense sequence
  source 1..19: mol_type = other RNA
gcttctcttctcagctgcg

SEQ ID NO: 69267 - RNA, 19 nt, synthetic construct
  misc_feature 1..19: note = siRNA antisense sequence
  source 1..19: mol_type = other RNA
cgcagctgagaagagaagc

SEQ ID NO: 69268 - RNA, 19 nt, synthetic construct
  misc_feature 1..19: note = siRNA sense sequence
  source 1..19: mol_type = other RNA
cttctcttctcagctgcgt

SEQ ID NO: 69269 - RNA, 19 nt, synthetic construct
  misc_feature 1..19: note = siRNA antisense sequence
  source 1..19: mol_type = other RNA
acgcagctgagaagagaag

SEQ ID NO: 69270 - RNA, 19 nt, synthetic construct
  misc_feature 1..19: note = siRNA sense sequence
  source 1..19: mol_type = other RNA
ttctcttctcagctgcgtg

SEQ ID NO: 69271 - RNA, 19 nt, synthetic construct
  misc_feature 1..19: note = siRNA antisense sequence
  source 1..19: mol_type = other RNA
cacgcagctgagaagagaa

SEQ ID NO: 69272 - RNA, 19 nt, synthetic construct
  misc_feature 1..19: note = siRNA sense sequence
  source 1..19: mol_type = other RNA
tctcttctcagctgcgtgg

SEQ ID NO: 69273 - RNA, 19 nt, synthetic construct
  misc_feature 1..19: note = siRNA antisense sequence
  source 1..19: mol_type = other RNA
ccacgcagctgagaagaga

SEQ ID NO: 69274 - RNA, 19 nt, synthetic construct
  misc_feature 1..19: note = siRNA sense sequence
  source 1..19: mol_type = other RNA
ctcttctcagctgcgtggt

SEQ ID NO: 69275 - RNA, 19 nt, synthetic construct
  misc_feature 1..19: note = siRNA antisense sequence
  source 1..19: mol_type = other RNA
accacgcagctgagaagag

SEQ ID NO: 69276 - RNA, 19 nt, synthetic construct
  misc_feature 1..19: note = siRNA sense sequence
  source 1..19: mol_type = other RNA
tcttctcagctgcgtggtg

SEQ ID NO: 69277 - RNA, 19 nt, synthetic construct
  misc_feature 1..19: note = siRNA antisense sequence
  source 1..19: mol_type = other RNA
caccacgcagctgagaaga

SEQ ID NO: 69278 - RNA, 19 nt, synthetic construct
  misc_feature 1..19: note = siRNA sense sequence
  source 1..19: mol_type = other RNA
cttctcagctgcgtggtgg

SEQ ID NO: 69279 - RNA, 19 nt, synthetic construct
  misc_feature 1..19: note = siRNA antisense sequence
  source 1..19: mol_type = other RNA
ccaccacgcagctgagaag

SEQ ID NO: 69280 - RNA, 19 nt, synthetic construct
  misc_feature 1..19: note = siRNA sense sequence
  source 1..19: mol_type = other RNA
ttctcagctgcgtggtggg

SEQ ID NO: 69281 - RNA, 19 nt, synthetic construct
  misc_feature 1..19: note = siRNA antisense sequence
  source 1..19: mol_type = other RNA
cccaccacgcagctgagaa

SEQ ID NO: 69282 - RNA, 19 nt, synthetic construct
  misc_feature 1..19: note = siRNA sense sequence
  source 1..19: mol_type = other RNA
gggtttcctcagcaaggcc

SEQ ID NO: 69283 - RNA, 19 nt, synthetic construct
  misc_feature 1..19: note = siRNA antisense sequence
  source 1..19: mol_type = other RNA
ggccttgctgaggaaaccc

SEQ ID NO: 69284 - RNA, 19 nt, synthetic construct
  misc_feature 1..19: note = siRNA sense sequence
  source 1..19: mol_type = other RNA
cctcagcaaggccattctc

SEQ ID NO: 69285 - RNA, 19 nt, synthetic construct
  misc_feature 1..19: note = siRNA antisense sequence
  source 1..19: mol_type = other RNA
gagaatggccttgctgagg

SEQ ID NO: 69286 - RNA, 19 nt, synthetic construct
  misc_feature 1..19: note = siRNA sense sequence
  source 1..19: mol_type = other RNA
ctcagcaaggccattctct

SEQ ID NO: 69287 - RNA, 19 nt, synthetic construct
  misc_feature 1..19: note = siRNA antisense sequence
  source 1..19: mol_type = other RNA
agagaatggccttgctgag

SEQ ID NO: 69288 - RNA, 19 nt, synthetic construct
  misc_feature 1..19: note = siRNA sense sequence
  source 1..19: mol_type = other RNA
tcagcaaggccattctctg

SEQ ID NO: 69289 - RNA, 19 nt, synthetic construct
  misc_feature 1..19: note = siRNA antisense sequence
  source 1..19: mol_type = other RNA
cagagaatggccttgctga

SEQ ID NO: 69290 - RNA, 19 nt, synthetic construct
  misc_feature 1..19: note = siRNA sense sequence
  source 1..19: mol_type = other RNA
ggccattctctgccttgtg

SEQ ID NO: 69291 - RNA, 19 nt, synthetic construct
  misc_feature 1..19: note = siRNA antisense sequence
  source 1..19: mol_type = other RNA
cacaaggcagagaatggcc

SEQ ID NO: 69292 - RNA, 19 nt, synthetic construct
  misc_feature 1..19: note = siRNA sense sequence
  source 1..19: mol_type = other RNA
gccattctctgccttgtgc

SEQ ID NO: 69293 - RNA, 19 nt, synthetic construct
  misc_feature 1..19: note = siRNA antisense sequence
  source 1..19: mol_type = other RNA
gcacaaggcagagaatggc

SEQ ID NO: 69294 - RNA, 19 nt, synthetic construct
  misc_feature 1..19: note = siRNA sense sequence
  source 1..19: mol_type = other RNA
attctctgccttgtgccca

SEQ ID NO: 69295 - RNA, 19 nt, synthetic construct
  misc_feature 1..19: note = siRNA antisense sequence
  source 1..19: mol_type = other RNA
tgggcacaaggcagagaat

SEQ ID NO: 69296 - RNA, 19 nt, synthetic construct
  misc_feature 1..19: note = siRNA sense sequence
  source 1..19: mol_type = other RNA
ttctctgccttgtgcccat

SEQ ID NO: 69297 - RNA, 19 nt, synthetic construct
  misc_feature 1..19: note = siRNA antisense sequence
  source 1..19: mol_type = other RNA
atgggcacaaggcagagaa

SEQ ID NO: 69298 - RNA, 19 nt, synthetic construct
  misc_feature 1..19: note = siRNA sense sequence
  source 1..19: mol_type = other RNA
tctctgccttgtgcccata

SEQ ID NO: 69299 - RNA, 19 nt, synthetic construct
  misc_feature 1..19: note = siRNA antisense sequence
  source 1..19: mol_type = other RNA
tatgggcacaaggcagaga

SEQ ID NO: 69300 - RNA, 19 nt, synthetic construct
  misc_feature 1..19: note = siRNA sense sequence
  source 1..19: mol_type = other RNA
ctctgccttgtgcccatag

SEQ ID NO: 69301 - RNA, 19 nt, synthetic construct
  misc_feature 1..19: note = siRNA antisense sequence
  source 1..19: mol_type = other RNA
ctatgggcacaaggcagag

SEQ ID NO: 69302 - RNA, 19 nt, synthetic construct
  misc_feature 1..19: note = siRNA sense sequence
  source 1..19: mol_type = other RNA
ccatagcagggccttgggt

SEQ ID NO: 69303 - RNA, 19 nt, synthetic construct
  misc_feature 1..19: note = siRNA antisense sequence
  source 1..19: mol_type = other RNA
acccaaggccctgctatgg

SEQ ID NO: 69304 - RNA, 19 nt, synthetic construct
  misc_feature 1..19: note = siRNA sense sequence
  source 1..19: mol_type = other RNA
catagcagggccttgggtg

SEQ ID NO: 69305 - RNA, 19 nt, synthetic construct
  misc_feature 1..19: note = siRNA antisense sequence
  source 1..19: mol_type = other RNA
cacccaaggccctgctatg

SEQ ID NO: 69306 - RNA, 19 nt, synthetic construct
  misc_feature 1..19: note = siRNA sense sequence
  source 1..19: mol_type = other RNA
atagcagggccttgggtgg

SEQ ID NO: 69307 - RNA, 19 nt, synthetic construct
  misc_feature 1..19: note = siRNA antisense sequence
  source 1..19: mol_type = other RNA
ccacccaaggccctgctat

SEQ ID NO: 69308 - RNA, 19 nt, synthetic construct
  misc_feature 1..19: note = siRNA sense sequence
  source 1..19: mol_type = other RNA
tagcagggccttgggtggt

SEQ ID NO: 69309 - RNA, 19 nt, synthetic construct
  misc_feature 1..19: note = siRNA antisense sequence
  source 1..19: mol_type = other RNA
accacccaaggccctgcta

SEQ ID NO: 69310 - RNA, 19 nt, synthetic construct
  misc_feature 1..19: note = siRNA sense sequence
  source 1..19: mol_type = other RNA
agggccttgggtggtgaca

SEQ ID NO: 69311 - RNA, 19 nt, synthetic construct
  misc_feature 1..19: note = siRNA antisense sequence
  source 1..19: mol_type = other RNA
tgtcaccacccaaggccct

SEQ ID NO: 69312 - RNA, 19 nt, synthetic construct
  misc_feature 1..19: note = siRNA sense sequence
  source 1..19: mol_type = other RNA
gttatctttgttggtgagc

SEQ ID NO: 69313 - RNA, 19 nt, synthetic construct
  misc_feature 1..19: note = siRNA antisense sequence
  source 1..19: mol_type = other RNA
gctcaccaacaaagataac

SEQ ID NO: 69314 - RNA, 19 nt, synthetic construct
  misc_feature 1..19: note = siRNA sense sequence
  source 1..19: mol_type = other RNA
ttatctttgttggtgagca

SEQ ID NO: 69315 - RNA, 19 nt, synthetic construct
  misc_feature 1..19: note = siRNA antisense sequence
  source 1..19: mol_type = other RNA
tgctcaccaacaaagataa

SEQ ID NO: 69316 - RNA, 19 nt, synthetic construct
  misc_feature 1..19: note = siRNA sense sequence
  source 1..19: mol_type = other RNA
tatctttgttggtgagcag

SEQ ID NO: 69317 - RNA, 19 nt, synthetic construct
  misc_feature 1..19: note = siRNA antisense sequence
  source 1..19: mol_type = other RNA
ctgctcaccaacaaagata

SEQ ID NO: 69318 - RNA, 19 nt, synthetic construct
  misc_feature 1..19: note = siRNA sense sequence
  source 1..19: mol_type = other RNA
atctttgttggtgagcaga

SEQ ID NO: 69319 - RNA, 19 nt, synthetic construct
  misc_feature 1..19: note = siRNA antisense sequence
  source 1..19: mol_type = other RNA
tctgctcaccaacaaagat

SEQ ID NO: 69320 - RNA, 19 nt, synthetic construct
  misc_feature 1..19: note = siRNA sense sequence
  source 1..19: mol_type = other RNA
ttgttggtgagcagacact

SEQ ID NO: 69321 - RNA, 19 nt, synthetic construct
  misc_feature 1..19: note = siRNA antisense sequence
  source 1..19: mol_type = other RNA
agtgtctgctcaccaacaa

SEQ ID NO: 69322 - RNA, 19 nt, synthetic construct
  misc_feature 1..19: note = siRNA sense sequence
  source 1..19: mol_type = other RNA
tgttggtgagcagacactc

SEQ ID NO: 69323 - RNA, 19 nt, synthetic construct
  misc_feature 1..19: note = siRNA antisense sequence
  source 1..19: mol_type = other RNA
gagtgtctgctcaccaaca

SEQ ID NO: 69324 - RNA, 19 nt, synthetic construct
  misc_feature 1..19: note = siRNA sense sequence
  source 1..19: mol_type = other RNA
gatcctttaattatctgac

SEQ ID NO: 69325 - RNA, 19 nt, synthetic construct
  misc_feature 1..19: note = siRNA antisense sequence
  source 1..19: mol_type = other RNA
gtcagataattaaaggatc

SEQ ID NO: 69326 - RNA, 19 nt, synthetic construct
  misc_feature 1..19: note = siRNA sense sequence
  source 1..19: mol_type = other RNA
tcctttaattatctgacac

SEQ ID NO: 69327 - RNA, 19 nt, synthetic construct
  misc_feature 1..19: note = siRNA antisense sequence
  source 1..19: mol_type = other RNA
gtgtcagataattaaagga

SEQ ID NO: 69328 - RNA, 19 nt, synthetic construct
  misc_feature 1..19: note = siRNA sense sequence
  source 1..19: mol_type = other RNA
aaatcttggcaatcaacta

SEQ ID NO: 69329 - RNA, 19 nt, synthetic construct
  misc_feature 1..19: note = siRNA antisense sequence
  source 1..19: mol_type = other RNA
tagttgattgccaagattt

SEQ ID NO: 69330 - RNA, 19 nt, synthetic construct
  misc_feature 1..19: note = siRNA sense sequence
  source 1..19: mol_type = other RNA
aatcttggcaatcaactaa

SEQ ID NO: 69331 - RNA, 19 nt, synthetic construct
  misc_feature 1..19: note = siRNA antisense sequence
  source 1..19: mol_type = other RNA
ttagttgattgccaagatt

SEQ ID NO: 69332 - RNA, 19 nt, synthetic construct
  misc_feature 1..19: note = siRNA sense sequence
  source 1..19: mol_type = other RNA
atcttggcaatcaactaag

SEQ ID NO: 69333 - RNA, 19 nt, synthetic construct
  misc_feature 1..19: note = siRNA antisense sequence
  source 1..19: mol_type = other RNA
cttagttgattgccaagat

SEQ ID NO: 69334 - RNA, 19 nt, synthetic construct
  misc_feature 1..19: note = siRNA sense sequence
  source 1..19: mol_type = other RNA
tcttggcaatcaactaagg

SEQ ID NO: 69335 - RNA, 19 nt, synthetic construct
  misc_feature 1..19: note = siRNA antisense sequence
  source 1..19: mol_type = other RNA
ccttagttgattgccaaga

SEQ ID NO: 69336 - RNA, 19 nt, synthetic construct
  misc_feature 1..19: note = siRNA sense sequence
  source 1..19: mol_type = other RNA
cttggcaatcaactaagga

SEQ ID NO: 69337 - RNA, 19 nt, synthetic construct
  misc_feature 1..19: note = siRNA antisense sequence
  source 1..19: mol_type = other RNA
tccttagttgattgccaag

SEQ ID NO: 69338 - RNA, 19 nt, synthetic construct
  misc_feature 1..19: note = siRNA sense sequence
  source 1..19: mol_type = other RNA
ttggcaatcaactaaggac

SEQ ID NO: 69339 - RNA, 19 nt, synthetic construct
  misc_feature 1..19: note = siRNA antisense sequence
  source 1..19: mol_type = other RNA
gtccttagttgattgccaa

SEQ ID NO: 69340 - RNA, 19 nt, synthetic construct
  misc_feature 1..19: note = siRNA sense sequence
  source 1..19: mol_type = other RNA
tggcaatcaactaaggacc

SEQ ID NO: 69341 - RNA, 19 nt, synthetic construct
  misc_feature 1..19: note = siRNA antisense sequence
  source 1..19: mol_type = other RNA
ggtccttagttgattgcca

SEQ ID NO: 69342 - RNA, 19 nt, synthetic construct
  misc_feature 1..19: note = siRNA sense sequence
  source 1..19: mol_type = other RNA
ggcaatcaactaaggacct

SEQ ID NO: 69343 - RNA, 19 nt, synthetic construct
  misc_feature 1..19: note = siRNA antisense sequence
  source 1..19: mol_type = other RNA
aggtccttagttgattgcc

SEQ ID NO: 69344 - RNA, 19 nt, synthetic construct
  misc_feature 1..19: note = siRNA sense sequence
  source 1..19: mol_type = other RNA
gcaatcaactaaggacctg

SEQ ID NO: 69345 - RNA, 19 nt, synthetic construct
  misc_feature 1..19: note = siRNA antisense sequence
  source 1..19: mol_type = other RNA
caggtccttagttgattgc

SEQ ID NO: 69346 - RNA, 19 nt, synthetic construct
  misc_feature 1..19: note = siRNA sense sequence
  source 1..19: mol_type = other RNA
caatcaactaaggacctgt

SEQ ID NO: 69347 - RNA, 19 nt, synthetic construct
  misc_feature 1..19: note = siRNA antisense sequence
  source 1..19: mol_type = other RNA
acaggtccttagttgattg

SEQ ID NO: 69348 - RNA, 19 nt, synthetic construct
  misc_feature 1..19: note = siRNA sense sequence
  source 1..19: mol_type = other RNA
aatcaactaaggacctgtg

SEQ ID NO: 69349 - RNA, 19 nt, synthetic construct
  misc_feature 1..19: note = siRNA antisense sequence
  source 1..19: mol_type = other RNA
cacaggtccttagttgatt

SEQ ID NO: 69350 - RNA, 19 nt, synthetic construct
  misc_feature 1..19: note = siRNA sense sequence
  source 1..19: mol_type = other RNA
aactaaggacctgtgacac

SEQ ID NO: 69351 - RNA, 19 nt, synthetic construct
  misc_feature 1..19: note = siRNA antisense sequence
  source 1..19: mol_type = other RNA
gtgtcacaggtccttagtt

SEQ ID NO: 69352 - RNA, 19 nt, synthetic construct
  misc_feature 1..19: note = siRNA sense sequence
  source 1..19: mol_type = other RNA
actaaggacctgtgacact

SEQ ID NO: 69353 - RNA, 19 nt, synthetic construct
  misc_feature 1..19: note = siRNA antisense sequence
  source 1..19: mol_type = other RNA
agtgtcacaggtccttagt

SEQ ID NO: 69354 - RNA, 19 nt, synthetic construct
  misc_feature 1..19: note = siRNA sense sequence
  source 1..19: mol_type = other RNA
ctaaggacctgtgacactc

SEQ ID NO: 69355 - RNA, 19 nt, synthetic construct
  misc_feature 1..19: note = siRNA antisense sequence
  source 1..19: mol_type = other RNA
gagtgtcacaggtccttag

SEQ ID NO: 69356 - RNA, 19 nt, synthetic construct
  misc_feature 1..19: note = siRNA sense sequence
  source 1..19: mol_type = other RNA
ggacctgtgacactcataa

SEQ ID NO: 69357 - RNA, 19 nt, synthetic construct
  misc_feature 1..19: note = siRNA antisense sequence
  source 1..19: mol_type = other RNA
ttatgagtgtcacaggtcc

SEQ ID NO: 69358 - RNA, 19 nt, synthetic construct
  misc_feature 1..19: note = siRNA sense sequence
  source 1..19: mol_type = other RNA
gacctgtgacactcataac

SEQ ID NO: 69359 - RNA, 19 nt, synthetic construct
  misc_feature 1..19: note = siRNA antisense sequence
  source 1..19: mol_type = other RNA
gttatgagtgtcacaggtc

SEQ ID NO: 69360 - RNA, 19 nt, synthetic construct
  misc_feature 1..19: note = siRNA sense sequence
  source 1..19: mol_type = other RNA
acctgtgacactcataact

SEQ ID NO: 69361 - RNA, 19 nt, synthetic construct
  misc_feature 1..19: note = siRNA antisense sequence
  source 1..19: mol_type = other RNA
agttatgagtgtcacaggt

SEQ ID NO: 69362 - RNA, 19 nt, synthetic construct
  misc_feature 1..19: note = siRNA sense sequence
  source 1..19: mol_type = other RNA
cctgtgacactcataacta

SEQ ID NO: 69363 - RNA, 19 nt, synthetic construct
  misc_feature 1..19: note = siRNA antisense sequence
  source 1..19: mol_type = other RNA
tagttatgagtgtcacagg

SEQ ID NO: 69364 - RNA, 19 nt, synthetic construct
  misc_feature 1..19: note = siRNA sense sequence
  source 1..19: mol_type = other RNA
ctgtgacactcataactat

SEQ ID NO: 69365 - RNA, 19 nt, synthetic construct
  misc_feature 1..19: note = siRNA antisense sequence
  source 1..19: mol_type = other RNA
atagttatgagtgtcacag

SEQ ID NO: 69366 - RNA, 19 nt, synthetic construct
  misc_feature 1..19: note = siRNA sense sequence
  source 1..19: mol_type = other RNA
tgtgacactcataactatg

SEQ ID NO: 69367 - RNA, 19 nt, synthetic construct
  misc_feature 1..19: note = siRNA antisense sequence
  source 1..19: mol_type = other RNA
catagttatgagtgtcaca

SEQ ID NO: 69368 - RNA, 19 nt, synthetic construct
  misc_feature 1..19: note = siRNA sense sequence
  source 1..19: mol_type = other RNA
ttacatttggctttagcat

SEQ ID NO: 69369 - RNA, 19 nt, synthetic construct
  misc_feature 1..19: note = siRNA antisense sequence
  source 1..19: mol_type = other RNA
atgctaaagccaaatgtaa

SEQ ID NO: 69370 - RNA, 19 nt, synthetic construct
  misc_feature 1..19: note = siRNA sense sequence
  source 1..19: mol_type = other RNA
tacatttggctttagcata

SEQ ID NO: 69371 - RNA, 19 nt, synthetic construct
  misc_feature 1..19: note = siRNA antisense sequence
  source 1..19: mol_type = other RNA
tatgctaaagccaaatgta

SEQ ID NO: 69372 - RNA, 19 nt, synthetic construct
  misc_feature 1..19: note = siRNA sense sequence
  source 1..19: mol_type = other RNA
acatttggctttagcatat

SEQ ID NO: 69373 - RNA, 19 nt, synthetic construct
  misc_feature 1..19: note = siRNA antisense sequence
  source 1..19: mol_type = other RNA
atatgctaaagccaaatgt

SEQ ID NO: 69374 - RNA, 19 nt, synthetic construct
  misc_feature 1..19: note = siRNA sense sequence
  source 1..19: mol_type = other RNA
catttggctttagcatatt

SEQ ID NO: 69375 - RNA, 19 nt, synthetic construct
  misc_feature 1..19: note = siRNA antisense sequence
  source 1..19: mol_type = other RNA
aatatgctaaagccaaatg

SEQ ID NO: 69376 - RNA, 19 nt, synthetic construct
  misc_feature 1..19: note = siRNA sense sequence
  source 1..19: mol_type = other RNA
tttggctttagcatatttc

SEQ ID NO: 69377 - RNA, 19 nt, synthetic construct
  misc_feature 1..19: note = siRNA antisense sequence
  source 1..19: mol_type = other RNA
gaaatatgctaaagccaaa

SEQ ID NO: 69378 - RNA, 19 nt, synthetic construct
  misc_feature 1..19: note = siRNA sense sequence
  source 1..19: mol_type = other RNA
gctttagcatatttcaggt

SEQ ID NO: 69379 - RNA, 19 nt, synthetic construct
  misc_feature 1..19: note = siRNA antisense sequence
  source 1..19: mol_type = other RNA
acctgaaatatgctaaagc

SEQ ID NO: 69380 - RNA, 19 nt, synthetic construct
  misc_feature 1..19: note = siRNA sense sequence
  source 1..19: mol_type = other RNA
ctttagcatatttcaggta

SEQ ID NO: 69381 - RNA, 19 nt, synthetic construct
  misc_feature 1..19: note = siRNA antisense sequence
  source 1..19: mol_type = other RNA
tacctgaaatatgctaaag

SEQ ID NO: 69382 - RNA, 19 nt, synthetic construct
  misc_feature 1..19: note = siRNA sense sequence
  source 1..19: mol_type = other RNA
aactcttttgcaatagact

SEQ ID NO: 69383 - RNA, 19 nt, synthetic construct
  misc_feature 1..19: note = siRNA antisense sequence
  source 1..19: mol_type = other RNA
agtctattgcaaaagagtt

SEQ ID NO: 69384 - RNA, 19 nt, synthetic construct
  misc_feature 1..19: note = siRNA sense sequence
  source 1..19: mol_type = other RNA
aaagccagttgtggtcttg

SEQ ID NO: 69385 - RNA, 19 nt, synthetic construct
  misc_feature 1..19: note = siRNA antisense sequence
  source 1..19: mol_type = other RNA
caagaccacaactggcttt

SEQ ID NO: 69386 - RNA, 19 nt, synthetic construct
  misc_feature 1..19: note = siRNA sense sequence
  source 1..19: mol_type = other RNA
aagccagttgtggtcttga

SEQ ID NO: 69387 - RNA, 19 nt, synthetic construct
  misc_feature 1..19: note = siRNA antisense sequence
  source 1..19: mol_type = other RNA
tcaagaccacaactggctt

SEQ ID NO: 69388 - RNA, 19 nt, synthetic construct
  misc_feature 1..19: note = siRNA sense sequence
  source 1..19: mol_type = other RNA
agccagttgtggtcttgaa

SEQ ID NO: 69389 - RNA, 19 nt, synthetic construct
  misc_feature 1..19: note = siRNA antisense sequence
  source 1..19: mol_type = other RNA
ttcaagaccacaactggct

SEQ ID NO: 69390 - RNA, 19 nt, synthetic construct
  misc_feature 1..19: note = siRNA sense sequence
  source 1..19: mol_type = other RNA
tctctctattgcattactt

SEQ ID NO: 69391 - RNA, 19 nt, synthetic construct
  misc_feature 1..19: note = siRNA antisense sequence
  source 1..19: mol_type = other RNA
aagtaatgcaatagagaga

SEQ ID NO: 69392 - RNA, 19 nt, synthetic construct
  misc_feature 1..19: note = siRNA sense sequence
  source 1..19: mol_type = other RNA
ctctctattgcattactta

SEQ ID NO: 69393 - RNA, 19 nt, synthetic construct
  misc_feature 1..19: note = siRNA antisense sequence
  source 1..19: mol_type = other RNA
taagtaatgcaatagagag

SEQ ID NO: 69394 - RNA, 19 nt, synthetic construct
  misc_feature 1..19: note = siRNA sense sequence
  source 1..19: mol_type = other RNA
ctctattgcattacttatc

SEQ ID NO: 69395 - RNA, 19 nt, synthetic construct
  misc_feature 1..19: note = siRNA antisense sequence
  source 1..19: mol_type = other RNA
gataagtaatgcaatagag

SEQ ID NO: 69396 - RNA, 19 nt, synthetic construct
  misc_feature 1..19: note = siRNA sense sequence
  source 1..19: mol_type = other RNA
tctattgcattacttatcc

SEQ ID NO: 69397 - RNA, 19 nt, synthetic construct
  misc_feature 1..19: note = siRNA antisense sequence
  source 1..19: mol_type = other RNA
ggataagtaatgcaataga

SEQ ID NO: 69398 - RNA, 19 nt, synthetic construct
  misc_feature 1..19: note = siRNA sense sequence
  source 1..19: mol_type = other RNA
ctattgcattacttatcct

SEQ ID NO: 69399 - RNA, 19 nt, synthetic construct
  misc_feature 1..19: note = siRNA antisense sequence
  source 1..19: mol_type = other RNA
aggataagtaatgcaatag

SEQ ID NO: 69400 - RNA, 19 nt, synthetic construct
  misc_feature 1..19: note = siRNA sense sequence
  source 1..19: mol_type = other RNA
tattgcattacttatcctc

SEQ ID NO: 69401 - RNA, 19 nt, synthetic construct
  misc_feature 1..19: note = siRNA antisense sequence
  source 1..19: mol_type = other RNA
gaggataagtaatgcaata

SEQ ID NO: 69402 - RNA, 19 nt, synthetic construct
  misc_feature 1..19: note = siRNA sense sequence
  source 1..19: mol_type = other RNA
gcattacttatcctcaccc

SEQ ID NO: 69403 - RNA, 19 nt, synthetic construct
  misc_feature 1..19: note = siRNA antisense sequence
  source 1..19: mol_type = other RNA
gggtgaggataagtaatgc

SEQ ID NO: 69404 - RNA, 19 nt, synthetic construct
  misc_feature 1..19: note = siRNA sense sequence
  source 1..19: mol_type = other RNA
attacttatcctcaccctt

SEQ ID NO: 69405 - RNA, 19 nt, synthetic construct
  misc_feature 1..19: note = siRNA antisense sequence
  source 1..19: mol_type = other RNA
aagggtgaggataagtaat

SEQ ID NO: 69406 - RNA, 19 nt, synthetic construct
  misc_feature 1..19: note = siRNA sense sequence
  source 1..19: mol_type = other RNA
ttacttatcctcacccttg

SEQ ID NO: 69407 - RNA, 19 nt, synthetic construct
  misc_feature 1..19: note = siRNA antisense sequence
  source 1..19: mol_type = other RNA
caagggtgaggataagtaa

SEQ ID NO: 69408 - RNA, 19 nt, synthetic construct
  misc_feature 1..19: note = siRNA sense sequence
  source 1..19: mol_type = other RNA
tacttatcctcacccttgt

SEQ ID NO: 69409 - RNA, 19 nt, synthetic construct
  misc_feature 1..19: note = siRNA antisense sequence
  source 1..19: mol_type = other RNA
acaagggtgaggataagta

SEQ ID NO: 69410 - RNA, 19 nt, synthetic construct
  misc_feature 1..19: note = siRNA sense sequence
  source 1..19: mol_type = other RNA
acttatcctcacccttgtt

SEQ ID NO: 69411 - RNA, 19 nt, synthetic construct
  misc_feature 1..19: note = siRNA antisense sequence
  source 1..19: mol_type = other RNA
aacaagggtgaggataagt

SEQ ID NO: 69412 - RNA, 19 nt, synthetic construct
  misc_feature 1..19: note = siRNA sense sequence
  source 1..19: mol_type = other RNA
cttatcctcacccttgttt

SEQ ID NO: 69413 - RNA, 19 nt, synthetic construct
  misc_feature 1..19: note = siRNA antisense sequence
  source 1..19: mol_type = other RNA
aaacaagggtgaggataag

SEQ ID NO: 69414 - RNA, 19 nt, synthetic construct
  misc_feature 1..19: note = siRNA sense sequence
  source 1..19: mol_type = other RNA
ttatcctcacccttgtttt

SEQ ID NO: 69415 - RNA, 19 nt, synthetic construct
  misc_feature 1..19: note = siRNA antisense sequence
  source 1..19: mol_type = other RNA
aaaacaagggtgaggataa

SEQ ID NO: 69416 - RNA, 19 nt, synthetic construct
  misc_feature 1..19: note = siRNA sense sequence
  source 1..19: mol_type = other RNA
attgtcctttcctctacag

SEQ ID NO: 69417 - RNA, 19 nt, synthetic construct
  misc_feature 1..19: note = siRNA antisense sequence
  source 1..19: mol_type = other RNA
ctgtagaggaaaggacaat

SEQ ID NO: 69418 - RNA, 19 nt, synthetic construct
  misc_feature 1..19: note = siRNA sense sequence
  source 1..19: mol_type = other RNA
ttgtcctttcctctacaga

SEQ ID NO: 69419 - RNA, 19 nt, synthetic construct
  misc_feature 1..19: note = siRNA antisense sequence
  source 1..19: mol_type = other RNA
tctgtagaggaaaggacaa

SEQ ID NO: 69420 - RNA, 19 nt, synthetic construct
  misc_feature 1..19: note = siRNA sense sequence
  source 1..19: mol_type = other RNA
tcctttcctctacagaata

SEQ ID NO: 69421 - RNA, 19 nt, synthetic construct
  misc_feature 1..19: note = siRNA antisense sequence
  source 1..19: mol_type = other RNA
tattctgtagaggaaagga

SEQ ID NO: 69422 - RNA, 19 nt, synthetic construct
  misc_feature 1..19: note = siRNA sense sequence
  source 1..19: mol_type = other RNA
ttcctctacagaatagctg

SEQ ID NO: 69423 - RNA, 19 nt, synthetic construct
  misc_feature 1..19: note = siRNA antisense sequence
  source 1..19: mol_type = other RNA
cagctattctgtagaggaa

SEQ ID NO: 69424 - RNA, 19 nt, synthetic construct
  misc_feature 1..19: note = siRNA sense sequence
  source 1..19: mol_type = other RNA
gggaccaccacacttagga

SEQ ID NO: 69425 - RNA, 19 nt, synthetic construct
  misc_feature 1..19: note = siRNA antisense sequence
  source 1..19: mol_type = other RNA
tcctaagtgtggtggtccc

SEQ ID NO: 69426 - RNA, 19 nt, synthetic construct
  misc_feature 1..19: note = siRNA sense sequence
  source 1..19: mol_type = other RNA
ggaccaccacacttaggac

SEQ ID NO: 69427 - RNA, 19 nt, synthetic construct
  misc_feature 1..19: note = siRNA antisense sequence
  source 1..19: mol_type = other RNA
gtcctaagtgtggtggtcc

SEQ ID NO: 69428 - RNA, 19 nt, synthetic construct
  misc_feature 1..19: note = siRNA sense sequence
  source 1..19: mol_type = other RNA
gaccaccacacttaggacc

SEQ ID NO: 69429 - RNA, 19 nt, synthetic construct
  misc_feature 1..19: note = siRNA antisense sequence
  source 1..19: mol_type = other RNA
ggtcctaagtgtggtggtc

SEQ ID NO: 69430 - RNA, 19 nt, synthetic construct
  misc_feature 1..19: note = siRNA sense sequence
  source 1..19: mol_type = other RNA
accaccacacttaggacca

SEQ ID NO: 69431 - RNA, 19 nt, synthetic construct
  misc_feature 1..19: note = siRNA antisense sequence
  source 1..19: mol_type = other RNA
tggtcctaagtgtggtggt

SEQ ID NO: 69432 - RNA, 19 nt, synthetic construct
  misc_feature 1..19: note = siRNA sense sequence
  source 1..19: mol_type = other RNA
taggaccagtgccaggtga

SEQ ID NO: 69433 - RNA, 19 nt, synthetic construct
  misc_feature 1..19: note = siRNA antisense sequence
  source 1..19: mol_type = other RNA
tcacctggcactggtccta

SEQ ID NO: 69434 - RNA, 19 nt, synthetic construct
  misc_feature 1..19: note = siRNA sense sequence
  source 1..19: mol_type = other RNA
aggaccagtgccaggtgac

SEQ ID NO: 69435 - RNA, 19 nt, synthetic construct
  misc_feature 1..19: note = siRNA antisense sequence
  source 1..19: mol_type = other RNA
gtcacctggcactggtcct

SEQ ID NO: 69436 - RNA, 19 nt, synthetic construct
  misc_feature 1..19: note = siRNA sense sequence
  source 1..19: mol_type = other RNA
ggaccagtgccaggtgaca

SEQ ID NO: 69437 - RNA, 19 nt, synthetic construct
  misc_feature 1..19: note = siRNA antisense sequence
  source 1..19: mol_type = other RNA
tgtcacctggcactggtcc

SEQ ID NO: 69438 - RNA, 19 nt, synthetic construct
  misc_feature 1..19: note = siRNA sense sequence
  source 1..19: mol_type = other RNA
cagcattttgcaccttgag

SEQ ID NO: 69439 - RNA, 19 nt, synthetic construct
  misc_feature 1..19: note = siRNA antisense sequence
  source 1..19: mol_type = other RNA
ctcaaggtgcaaaatgctg

SEQ ID NO: 69440 - RNA, 19 nt, synthetic construct
  misc_feature 1..19: note = siRNA sense sequence
  source 1..19: mol_type = other RNA
gggtgagggagtggaagat

SEQ ID NO: 69441 - RNA, 19 nt, synthetic construct
  misc_feature 1..19: note = siRNA antisense sequence
  source 1..19: mol_type = other RNA
atcttccactccctcaccc

SEQ ID NO: 69442 - RNA, 19 nt, synthetic construct
  misc_feature 1..19: note = siRNA sense sequence
  source 1..19: mol_type = other RNA
gtgagggagtggaagatga

SEQ ID NO: 69443 - RNA, 19 nt, synthetic construct
  misc_feature 1..19: note = siRNA antisense sequence
  source 1..19: mol_type = other RNA
tcatcttccactccctcac

SEQ ID NO: 69444 - RNA, 19 nt, synthetic construct
  misc_feature 1..19: note = siRNA sense sequence
  source 1..19: mol_type = other RNA
agggagtggaagatgatga

SEQ ID NO: 69445 - RNA, 19 nt, synthetic construct
  misc_feature 1..19: note = siRNA antisense sequence
  source 1..19: mol_type = other RNA
tcatcatcttccactccct

SEQ ID NO: 69446 - RNA, 19 nt, synthetic construct
  misc_feature 1..19: note = siRNA sense sequence
  source 1..19: mol_type = other RNA
gggagtggaagatgatgaa

SEQ ID NO: 69447 - RNA, 19 nt, synthetic construct
  misc_feature 1..19: note = siRNA antisense sequence
  source 1..19: mol_type = other RNA
ttcatcatcttccactccc

SEQ ID NO: 69448 - RNA, 19 nt, synthetic construct
  misc_feature 1..19: note = siRNA sense sequence
  source 1..19: mol_type = other RNA
tcttttatgtctacatcct

SEQ ID NO: 69449 - RNA, 19 nt, synthetic construct
  misc_feature 1..19: note = siRNA antisense sequence
  source 1..19: mol_type = other RNA
aggatgtagacataaaaga

SEQ ID NO: 69450 - RNA, 19 nt, synthetic construct
  misc_feature 1..19: note = siRNA sense sequence
  source 1..19: mol_type = other RNA
tttatgtctacatccttac

SEQ ID NO: 69451 - RNA, 19 nt, synthetic construct
  misc_feature 1..19: note = siRNA antisense sequence
  source 1..19: mol_type = other RNA
gtaaggatgtagacataaa

SEQ ID NO: 69452 - RNA, 19 nt, synthetic construct
  misc_feature 1..19: note = siRNA sense sequence
  source 1..19: mol_type = other RNA
ttatgtctacatccttact

SEQ ID NO: 69453 - RNA, 19 nt, synthetic construct
  misc_feature 1..19: note = siRNA antisense sequence
  source 1..19: mol_type = other RNA
agtaaggatgtagacataa

SEQ ID NO: 69454 - RNA, 19 nt, synthetic construct
  misc_feature 1..19: note = siRNA sense sequence
  source 1..19: mol_type = other RNA
atgtctacatccttactcc

SEQ ID NO: 69455 - RNA, 19 nt, synthetic construct
  misc_feature 1..19: note = siRNA antisense sequence
  source 1..19: mol_type = other RNA
ggagtaaggatgtagacat

SEQ ID NO: 69456 - RNA, 19 nt, synthetic construct
  misc_feature 1..19: note = siRNA sense sequence
  source 1..19: mol_type = other RNA
tgtctacatccttactcct

SEQ ID NO: 69457 - RNA, 19 nt, synthetic construct
  misc_feature 1..19: note = siRNA antisense sequence
  source 1..19: mol_type = other RNA
aggagtaaggatgtagaca

SEQ ID NO: 69458 - RNA, 19 nt, synthetic construct
  misc_feature 1..19: note = siRNA sense sequence
  source 1..19: mol_type = other RNA
gtctacatccttactcctc

SEQ ID NO: 69459 - RNA, 19 nt, synthetic construct
  misc_feature 1..19: note = siRNA antisense sequence
  source 1..19: mol_type = other RNA
gaggagtaaggatgtagac

SEQ ID NO: 69460 - RNA, 19 nt, synthetic construct
  misc_feature 1..19: note = siRNA sense sequence
  source 1..19: mol_type = other RNA
acatccttactcctcaaaa

SEQ ID NO: 69461 - RNA, 19 nt, synthetic construct
  misc_feature 1..19: note = siRNA antisense sequence
  source 1..19: mol_type = other RNA
ttttgaggagtaaggatgt

SEQ ID NO: 69462 - RNA, 19 nt, synthetic construct
  misc_feature 1..19: note = siRNA sense sequence
  source 1..19: mol_type = other RNA
catccttactcctcaaaat

SEQ ID NO: 69463 - RNA, 19 nt, synthetic construct
  misc_feature 1..19: note = siRNA antisense sequence
  source 1..19: mol_type = other RNA
attttgaggagtaaggatg

SEQ ID NO: 69464 - RNA, 19 nt, synthetic construct
  misc_feature 1..19: note = siRNA sense sequence
  source 1..19: mol_type = other RNA
atccttactcctcaaaata

SEQ ID NO: 69465 - RNA, 19 nt, synthetic construct
  misc_feature 1..19: note = siRNA antisense sequence
  source 1..19: mol_type = other RNA
tattttgaggagtaaggat

SEQ ID NO: 69466 - RNA, 19 nt, synthetic construct
  misc_feature 1..19: note = siRNA sense sequence
  source 1..19: mol_type = other RNA
tccttactcctcaaaatac

SEQ ID NO: 69467 - RNA, 19 nt, synthetic construct
  misc_feature 1..19: note = siRNA antisense sequence
  source 1..19: mol_type = other RNA
gtattttgaggagtaagga

SEQ ID NO: 69468 - RNA, 19 nt, synthetic construct
  misc_feature 1..19: note = siRNA sense sequence
  source 1..19: mol_type = other RNA
ccttactcctcaaaatact

SEQ ID NO: 69469 - RNA, 19 nt, synthetic construct
  misc_feature 1..19: note = siRNA antisense sequence
  source 1..19: mol_type = other RNA
agtattttgaggagtaagg

SEQ ID NO: 69470 - RNA, 19 nt, synthetic construct
  misc_feature 1..19: note = siRNA sense sequence
  source 1..19: mol_type = other RNA
cttactcctcaaaatactt

SEQ ID NO: 69471 - RNA, 19 nt, synthetic construct
  misc_feature 1..19: note = siRNA antisense sequence
  source 1..19: mol_type = other RNA
aagtattttgaggagtaag

SEQ ID NO: 69472 - RNA, 19 nt, synthetic construct
  misc_feature 1..19: note = siRNA sense sequence
  source 1..19: mol_type = other RNA
ctcctcaaaatactttaag

SEQ ID NO: 69473 - RNA, 19 nt, synthetic construct
  misc_feature 1..19: note = siRNA antisense sequence
  source 1..19: mol_type = other RNA
cttaaagtattttgaggag

SEQ ID NO: 69474 - RNA, 19 nt, synthetic construct
  misc_feature 1..19: note = siRNA sense sequence
  source 1..19: mol_type = other RNA
tcctcaaaatactttaagc

SEQ ID NO: 69475 - RNA, 19 nt, synthetic construct
  misc_feature 1..19: note = siRNA antisense sequence
  source 1..19: mol_type = other RNA
gcttaaagtattttgagga

SEQ ID NO: 69476 - RNA, 19 nt, synthetic construct
  misc_feature 1..19: note = siRNA sense sequence
  source 1..19: mol_type = other RNA
ctttaagctcactcagacc

SEQ ID NO: 69477 - RNA, 19 nt, synthetic construct
  misc_feature 1..19: note = siRNA antisense sequence
  source 1..19: mol_type = other RNA
ggtctgagtgagcttaaag

SEQ ID NO: 69478 - RNA, 19 nt, synthetic construct
  misc_feature 1..19: note = siRNA sense sequence
  source 1..19: mol_type = other RNA
tcttatgtgtagattaacc

SEQ ID NO: 69479 - RNA, 19 nt, synthetic construct
  misc_feature 1..19: note = siRNA antisense sequence
  source 1..19: mol_type = other RNA
ggttaatctacacataaga

SEQ ID NO: 69480 - RNA, 19 nt, synthetic construct
  misc_feature 1..19: note = siRNA sense sequence
  source 1..19: mol_type = other RNA
cttatgtgtagattaacca

SEQ ID NO: 69481 - RNA, 19 nt, synthetic construct
  misc_feature 1..19: note = siRNA antisense sequence
  source 1..19: mol_type = other RNA
tggttaatctacacataag

SEQ ID NO: 69482 - RNA, 19 nt, synthetic construct
  misc_feature 1..19: note = siRNA sense sequence
  source 1..19: mol_type = other RNA
tatgtgtagattaaccaag

SEQ ID NO: 69483 - RNA, 19 nt, synthetic construct
  misc_feature 1..19: note = siRNA antisense sequence
  source 1..19: mol_type = other RNA
cttggttaatctacacata

SEQ ID NO: 69484 - RNA, 19 nt, synthetic construct
  misc_feature 1..19: note = siRNA sense sequence
  source 1..19: mol_type = other RNA
tgtagattaaccaaggcta

SEQ ID NO: 69485 - RNA, 19 nt, synthetic construct
  misc_feature 1..19: note = siRNA antisense sequence
  source 1..19: mol_type = other RNA
tagccttggttaatctaca

SEQ ID NO: 69486 - RNA, 19 nt, synthetic construct
  misc_feature 1..19: note = siRNA sense sequence
  source 1..19: mol_type = other RNA
gtagattaaccaaggctaa

SEQ ID NO: 69487 - RNA, 19 nt, synthetic construct
  misc_feature 1..19: note = siRNA antisense sequence
  source 1..19: mol_type = other RNA
ttagccttggttaatctac

SEQ ID NO: 69488 - RNA, 19 nt, synthetic construct
  misc_feature 1..19: note = siRNA sense sequence
  source 1..19: mol_type = other RNA
ttaaccaaggctaatttcc

SEQ ID NO: 69489 - RNA, 19 nt, synthetic construct
  misc_feature 1..19: note = siRNA antisense sequence
  source 1..19: mol_type = other RNA
ggaaattagccttggttaa

SEQ ID NO: 69490 - RNA, 19 nt, synthetic construct
  misc_feature 1..19: note = siRNA sense sequence
  source 1..19: mol_type = other RNA
gctaatttcctggagttta

SEQ ID NO: 69491 - RNA, 19 nt, synthetic construct
  misc_feature 1..19: note = siRNA antisense sequence
  source 1..19: mol_type = other RNA
taaactccaggaaattagc

SEQ ID NO: 69492 - RNA, 19 nt, synthetic construct
  misc_feature 1..19: note = siRNA sense sequence
  source 1..19: mol_type = other RNA
ctaatttcctggagtttaa

SEQ ID NO: 69493 - RNA, 19 nt, synthetic construct
  misc_feature 1..19: note = siRNA antisense sequence
  source 1..19: mol_type = other RNA
ttaaactccaggaaattag

SEQ ID NO: 69494 - RNA, 19 nt, synthetic construct
  misc_feature 1..19: note = siRNA sense sequence
  source 1..19: mol_type = other RNA
tttcctggagtttaataca

SEQ ID NO: 69495 - RNA, 19 nt, synthetic construct
  misc_feature 1..19: note = siRNA antisense sequence
  source 1..19: mol_type = other RNA
tgtattaaactccaggaaa

SEQ ID NO: 69496 - RNA, 19 nt, synthetic construct
  misc_feature 1..19: note = siRNA sense sequence
  source 1..19: mol_type = other RNA
caatcacttaatgcagcaa

SEQ ID NO: 69497 - RNA, 19 nt, synthetic construct
  misc_feature 1..19: note = siRNA antisense sequence
  source 1..19: mol_type = other RNA
ttgctgcattaagtgattg

SEQ ID NO: 69498 - RNA, 19 nt, synthetic construct
  misc_feature 1..19: note = siRNA sense sequence
  source 1..19: mol_type = other RNA
aatcacttaatgcagcaac

SEQ ID NO: 69499 - RNA, 19 nt, synthetic construct
  misc_feature 1..19: note = siRNA antisense sequence
  source 1..19: mol_type = other RNA
gttgctgcattaagtgatt

SEQ ID NO: 69500 - RNA, 19 nt, synthetic construct
  misc_feature 1..19: note = siRNA sense sequence
  source 1..19: mol_type = other RNA
tctcagaccctcttcactc

SEQ ID NO: 69501 - RNA, 19 nt, synthetic construct
  misc_feature 1..19: note = siRNA antisense sequence
  source 1..19: mol_type = other RNA
gagtgaagagggtctgaga

SEQ ID NO: 69502 - RNA, 19 nt, synthetic construct
  misc_feature 1..19: note = siRNA sense sequence
  source 1..19: mol_type = other RNA
ctcagaccctcttcactct

SEQ ID NO: 69503 - RNA, 19 nt, synthetic construct
  misc_feature 1..19: note = siRNA antisense sequence
  source 1..19: mol_type = other RNA
agagtgaagagggtctgag

SEQ ID NO: 69504 - RNA, 19 nt, synthetic construct
  misc_feature 1..19: note = siRNA sense sequence
  source 1..19: mol_type = other RNA
tcagaccctcttcactcta

SEQ ID NO: 69505 - RNA, 19 nt, synthetic construct
  misc_feature 1..19: note = siRNA antisense sequence
  source 1..19: mol_type = other RNA
tagagtgaagagggtctga

SEQ ID NO: 69506 - RNA, 19 nt, synthetic construct
  misc_feature 1..19: note = siRNA sense sequence
  source 1..19: mol_type = other RNA
cagaccctcttcactctag

SEQ ID NO: 69507 - RNA, 19 nt, synthetic construct
  misc_feature 1..19: note = siRNA antisense sequence
  source 1..19: mol_type = other RNA
ctagagtgaagagggtctg

SEQ ID NO: 69508 - RNA, 19 nt, synthetic construct
  misc_feature 1..19: note = siRNA sense sequence
  source 1..19: mol_type = other RNA
agaccctcttcactctaga

SEQ ID NO: 69509 - RNA, 19 nt, synthetic construct
  misc_feature 1..19: note = siRNA antisense sequence
  source 1..19: mol_type = other RNA
tctagagtgaagagggtct

SEQ ID NO: 69510 - RNA, 19 nt, synthetic construct
  misc_feature 1..19: note = siRNA sense sequence
  source 1..19: mol_type = other RNA
gaccctcttcactctagaa

SEQ ID NO: 69511 - RNA, 19 nt, synthetic construct
  misc_feature 1..19: note = siRNA antisense sequence
  source 1..19: mol_type = other RNA
ttctagagtgaagagggtc

SEQ ID NO: 69512 - RNA, 19 nt, synthetic construct
  misc_feature 1..19: note = siRNA sense sequence
  source 1..19: mol_type = other RNA
tatttctgatattgcctgc

SEQ ID NO: 69513 - RNA, 19 nt, synthetic construct
  misc_feature 1..19: note = siRNA antisense sequence
  source 1..19: mol_type = other RNA
gcaggcaatatcagaaata

SEQ ID NO: 69514 - RNA, 19 nt, synthetic construct
  misc_feature 1..19: note = siRNA sense sequence
  source 1..19: mol_type = other RNA
atttctgatattgcctgcc

SEQ ID NO: 69515 - RNA, 19 nt, synthetic construct
  misc_feature 1..19: note = siRNA antisense sequence
  source 1..19: mol_type = other RNA
ggcaggcaatatcagaaat

SEQ ID NO: 69516 - RNA, 19 nt, synthetic construct
  misc_feature 1..19: note = siRNA sense sequence
  source 1..19: mol_type = other RNA
tgatattgcctgccattac

SEQ ID NO: 69517 - RNA, 19 nt, synthetic construct
  misc_feature 1..19: note = siRNA antisense sequence
  source 1..19: mol_type = other RNA
gtaatggcaggcaatatca

SEQ ID NO: 69518 - RNA, 19 nt, synthetic construct
  misc_feature 1..19: note = siRNA sense sequence
  source 1..19: mol_type = other RNA
gatattgcctgccattact

SEQ ID NO: 69519 - RNA, 19 nt, synthetic construct
  misc_feature 1..19: note = siRNA antisense sequence
  source 1..19: mol_type = other RNA
agtaatggcaggcaatatc

SEQ ID NO: 69520 - RNA, 19 nt, synthetic construct
  misc_feature 1..19: note = siRNA sense sequence
  source 1..19: mol_type = other RNA
atattgcctgccattactc

SEQ ID NO: 69521 - RNA, 19 nt, synthetic construct
  misc_feature 1..19: note = siRNA antisense sequence
  source 1..19: mol_type = other RNA
gagtaatggcaggcaatat

SEQ ID NO: 69522 - RNA, 19 nt, synthetic construct
  misc_feature 1..19: note = siRNA sense sequence
  source 1..19: mol_type = other RNA
tattgcctgccattactca

SEQ ID NO: 69523 - RNA, 19 nt, synthetic construct
  misc_feature 1..19: note = siRNA antisense sequence
  source 1..19: mol_type = other RNA
tgagtaatggcaggcaata

SEQ ID NO: 69524 - RNA, 19 nt, synthetic construct
  misc_feature 1..19: note = siRNA sense sequence
  source 1..19: mol_type = other RNA
ccattactcaggatgcaag

SEQ ID NO: 69525 - RNA, 19 nt, synthetic construct
  misc_feature 1..19: note = siRNA antisense sequence
  source 1..19: mol_type = other RNA
cttgcatcctgagtaatgg

SEQ ID NO: 69526 - RNA, 19 nt, synthetic construct
  misc_feature 1..19: note = siRNA sense sequence
  source 1..19: mol_type = other RNA
attactcaggatgcaagag

SEQ ID NO: 69527 - RNA, 19 nt, synthetic construct
  misc_feature 1..19: note = siRNA antisense sequence
  source 1..19: mol_type = other RNA
ctcttgcatcctgagtaat

SEQ ID NO: 69528 - RNA, 19 nt, synthetic construct
  misc_feature 1..19: note = siRNA sense sequence
  source 1..19: mol_type = other RNA
tgctctgcattccttatta

SEQ ID NO: 69529 - RNA, 19 nt, synthetic construct
  misc_feature 1..19: note = siRNA antisense sequence
  source 1..19: mol_type = other RNA
taataaggaatgcagagca

SEQ ID NO: 69530 - RNA, 19 nt, synthetic construct
  misc_feature 1..19: note = siRNA sense sequence
  source 1..19: mol_type = other RNA
gctctgcattccttattag

SEQ ID NO: 69531 - RNA, 19 nt, synthetic construct
  misc_feature 1..19: note = siRNA antisense sequence
  source 1..19: mol_type = other RNA
ctaataaggaatgcagagc

SEQ ID NO: 69532 - RNA, 19 nt, synthetic construct
  misc_feature 1..19: note = siRNA sense sequence
  source 1..19: mol_type = other RNA
ctctgcattccttattagg

SEQ ID NO: 69533 - RNA, 19 nt, synthetic construct
  misc_feature 1..19: note = siRNA antisense sequence
  source 1..19: mol_type = other RNA
cctaataaggaatgcagag

SEQ ID NO: 69534 - RNA, 19 nt, synthetic construct
  misc_feature 1..19: note = siRNA sense sequence
  source 1..19: mol_type = other RNA
aaattgttaatggacagtg

SEQ ID NO: 69535 - RNA, 19 nt, synthetic construct
  misc_feature 1..19: note = siRNA antisense sequence
  source 1..19: mol_type = other RNA
cactgtccattaacaattt

SEQ ID NO: 69536 - RNA, 19 nt, synthetic construct
  misc_feature 1..19: note = siRNA sense sequence
  source 1..19: mol_type = other RNA
aattgttaatggacagtgt

SEQ ID NO: 69537 - RNA, 19 nt, synthetic construct
  misc_feature 1..19: note = siRNA antisense sequence
  source 1..19: mol_type = other RNA
acactgtccattaacaatt

SEQ ID NO: 69538 - RNA, 19 nt, synthetic construct
  misc_feature 1..19: note = siRNA sense sequence
  source 1..19: mol_type = other RNA
attgttaatggacagtgta

SEQ ID NO: 69539 - RNA, 19 nt, synthetic construct
  misc_feature 1..19: note = siRNA antisense sequence
  source 1..19: mol_type = other RNA
tacactgtccattaacaat

SEQ ID NO: 69540 - RNA, 19 nt, synthetic construct
  misc_feature 1..19: note = siRNA sense sequence
  source 1..19: mol_type = other RNA
ttgttaatggacagtgtaa

SEQ ID NO: 69541 - RNA, 19 nt, synthetic construct
  misc_feature 1..19: note = siRNA antisense sequence
  source 1..19: mol_type = other RNA
ttacactgtccattaacaa

SEQ ID NO: 69542 - RNA, 19 nt, synthetic construct
  misc_feature 1..19: note = siRNA sense sequence
  source 1..19: mol_type = other RNA
tgttaatggacagtgtaaa

SEQ ID NO: 69543 - RNA, 19 nt, synthetic construct
  misc_feature 1..19: note = siRNA antisense sequence
  source 1..19: mol_type = other RNA
tttacactgtccattaaca

SEQ ID NO: 69544 - RNA, 19 nt, synthetic construct
  misc_feature 1..19: note = siRNA sense sequence
  source 1..19: mol_type = other RNA
ttaatggacagtgtaaaga

SEQ ID NO: 69545 - RNA, 19 nt, synthetic construct
  misc_feature 1..19: note = siRNA antisense sequence
  source 1..19: mol_type = other RNA
tctttacactgtccattaa

SEQ ID NO: 69546 - RNA, 19 nt, synthetic construct
  misc_feature 1..19: note = siRNA sense sequence
  source 1..19: mol_type = other RNA
taatggacagtgtaaagaa

SEQ ID NO: 69547 - RNA, 19 nt, synthetic construct
  misc_feature 1..19: note = siRNA antisense sequence
  source 1..19: mol_type = other RNA
ttctttacactgtccatta

SEQ ID NO: 69548 - RNA, 19 nt, synthetic construct
  misc_feature 1..19: note = siRNA sense sequence
  source 1..19: mol_type = other RNA
aatggacagtgtaaagaat

SEQ ID NO: 69549 - RNA, 19 nt, synthetic construct
  misc_feature 1..19: note = siRNA antisense sequence
  source 1..19: mol_type = other RNA
attctttacactgtccatt

SEQ ID NO: 69550 - RNA, 19 nt, synthetic construct
  misc_feature 1..19: note = siRNA sense sequence
  source 1..19: mol_type = other RNA
tggacagtgtaaagaattg

SEQ ID NO: 69551 - RNA, 19 nt, synthetic construct
  misc_feature 1..19: note = siRNA antisense sequence
  source 1..19: mol_type = other RNA
caattctttacactgtcca

SEQ ID NO: 69552 - RNA, 19 nt, synthetic construct
  misc_feature 1..19: note = siRNA sense sequence
  source 1..19: mol_type = other RNA
ggacagtgtaaagaattgt

SEQ ID NO: 69553 - RNA, 19 nt, synthetic construct
  misc_feature 1..19: note = siRNA antisense sequence
  source 1..19: mol_type = other RNA
acaattctttacactgtcc

SEQ ID NO: 69554 - RNA, 19 nt, synthetic construct
  misc_feature 1..19: note = siRNA sense sequence
  source 1..19: mol_type = other RNA
gacagtgtaaagaattgta

SEQ ID NO: 69555 - RNA, 19 nt, synthetic construct
  misc_feature 1..19: note = siRNA antisense sequence
  source 1..19: mol_type = other RNA
tacaattctttacactgtc

SEQ ID NO: 69556 - RNA, 19 nt, synthetic construct
  misc_feature 1..19: note = siRNA sense sequence
  source 1..19: mol_type = other RNA
atatccatcactccaatga

SEQ ID NO: 69557 - RNA, 19 nt, synthetic construct
  misc_feature 1..19: note = siRNA antisense sequence
  source 1..19: mol_type = other RNA
tcattggagtgatggatat

SEQ ID NO: 69558 - RNA, 19 nt, synthetic construct
  misc_feature 1..19: note = siRNA sense sequence
  source 1..19: mol_type = other RNA
tatccatcactccaatgaa

SEQ ID NO: 69559 - RNA, 19 nt, synthetic construct
  misc_feature 1..19: note = siRNA antisense sequence
  source 1..19: mol_type = other RNA
ttcattggagtgatggata

SEQ ID NO: 69560 - RNA, 19 nt, synthetic construct
  misc_feature 1..19: note = siRNA sense sequence
  source 1..19: mol_type = other RNA
actgttctgcctgatctaa

SEQ ID NO: 69561 - RNA, 19 nt, synthetic construct
  misc_feature 1..19: note = siRNA antisense sequence
  source 1..19: mol_type = other RNA
ttagatcaggcagaacagt

SEQ ID NO: 69562 - RNA, 19 nt, synthetic construct
  misc_feature 1..19: note = siRNA sense sequence
  source 1..19: mol_type = other RNA
ctgttctgcctgatctaac

SEQ ID NO: 69563 - RNA, 19 nt, synthetic construct
  misc_feature 1..19: note = siRNA antisense sequence
  source 1..19: mol_type = other RNA
gttagatcaggcagaacag

SEQ ID NO: 69564 - RNA, 19 nt, synthetic construct
  misc_feature 1..19: note = siRNA sense sequence
  source 1..19: mol_type = other RNA
tgcctcactaaaatgacta

SEQ ID NO: 69565 - RNA, 19 nt, synthetic construct
  misc_feature 1..19: note = siRNA antisense sequence
  source 1..19: mol_type = other RNA
tagtcattttagtgaggca

SEQ ID NO: 69566 - RNA, 19 nt, synthetic construct
  misc_feature 1..19: note = siRNA sense sequence
  source 1..19: mol_type = other RNA
gcctcactaaaatgactaa

SEQ ID NO: 69567 - RNA, 19 nt, synthetic construct
  misc_feature 1..19: note = siRNA antisense sequence
  source 1..19: mol_type = other RNA
ttagtcattttagtgaggc

SEQ ID NO: 69568 - RNA, 19 nt, synthetic construct
  misc_feature 1..19: note = siRNA sense sequence
  source 1..19: mol_type = other RNA
cctcactaaaatgactaac

SEQ ID NO: 69569 - RNA, 19 nt, synthetic construct
  misc_feature 1..19: note = siRNA antisense sequence
  source 1..19: mol_type = other RNA
gttagtcattttagtgagg

SEQ ID NO: 69570 - RNA, 19 nt, synthetic construct
  misc_feature 1..19: note = siRNA sense sequence
  source 1..19: mol_type = other RNA
ctcactaaaatgactaact

SEQ ID NO: 69571 - RNA, 19 nt, synthetic construct
  misc_feature 1..19: note = siRNA antisense sequence
  source 1..19: mol_type = other RNA
agttagtcattttagtgag

SEQ ID NO: 69572 - RNA, 19 nt, synthetic construct
  misc_feature 1..19: note = siRNA sense sequence
  source 1..19: mol_type = other RNA
aaaatgactaacttaaggg

SEQ ID NO: 69573 - RNA, 19 nt, synthetic construct
  misc_feature 1..19: note = siRNA antisense sequence
  source 1..19: mol_type = other RNA
cccttaagttagtcatttt

SEQ ID NO: 69574 - RNA, 19 nt, synthetic construct
  misc_feature 1..19: note = siRNA sense sequence
  source 1..19: mol_type = other RNA
tgactaacttaagggaatg

SEQ ID NO: 69575 - RNA, 19 nt, synthetic construct
  misc_feature 1..19: note = siRNA antisense sequence
  source 1..19: mol_type = other RNA
cattcccttaagttagtca

SEQ ID NO: 69576 - RNA, 19 nt, synthetic construct
  misc_feature 1..19: note = siRNA sense sequence
  source 1..19: mol_type = other RNA
ttaagggaatgtgcatttc

SEQ ID NO: 69577 - RNA, 19 nt, synthetic construct
  misc_feature 1..19: note = siRNA antisense sequence
  source 1..19: mol_type = other RNA
gaaatgcacattcccttaa

SEQ ID NO: 69578 - RNA, 19 nt, synthetic construct
  misc_feature 1..19: note = siRNA sense sequence
  source 1..19: mol_type = other RNA
gggaatgtgcatttctaca

SEQ ID NO: 69579 - RNA, 19 nt, synthetic construct
  misc_feature 1..19: note = siRNA antisense sequence
  source 1..19: mol_type = other RNA
tgtagaaatgcacattccc

SEQ ID NO: 69580 - RNA, 19 nt, synthetic construct
  misc_feature 1..19: note = siRNA sense sequence
  source 1..19: mol_type = other RNA
atgtttcgattgcattcag

SEQ ID NO: 69581 - RNA, 19 nt, synthetic construct
  misc_feature 1..19: note = siRNA antisense sequence
  source 1..19: mol_type = other RNA
ctgaatgcaatcgaaacat

SEQ ID NO: 69582 - RNA, 19 nt, synthetic construct
  misc_feature 1..19: note = siRNA sense sequence
  source 1..19: mol_type = other RNA
tgtttcgattgcattcagg

SEQ ID NO: 69583 - RNA, 19 nt, synthetic construct
  misc_feature 1..19: note = siRNA antisense sequence
  source 1..19: mol_type = other RNA
cctgaatgcaatcgaaaca

SEQ ID NO: 69584 - RNA, 19 nt, synthetic construct
  misc_feature 1..19: note = siRNA sense sequence
  source 1..19: mol_type = other RNA
ataacctttgttgactctt

SEQ ID NO: 69585 - RNA, 19 nt, synthetic construct
  misc_feature 1..19: note = siRNA antisense sequence
  source 1..19: mol_type = other RNA
aagagtcaacaaaggttat

SEQ ID NO: 69586 - RNA, 19 nt, synthetic construct
  misc_feature 1..19: note = siRNA sense sequence
  source 1..19: mol_type = other RNA
cctttgttgactcttgtaa

SEQ ID NO: 69587 - RNA, 19 nt, synthetic construct
  misc_feature 1..19: note = siRNA antisense sequence
  source 1..19: mol_type = other RNA
ttacaagagtcaacaaagg

SEQ ID NO: 69588 - RNA, 19 nt, synthetic construct
  misc_feature 1..19: note = siRNA sense sequence
  source 1..19: mol_type = other RNA
ctttgttgactcttgtaat

SEQ ID NO: 69589 - RNA, 19 nt, synthetic construct
  misc_feature 1..19: note = siRNA antisense sequence
  source 1..19: mol_type = other RNA
attacaagagtcaacaaag

SEQ ID NO: 69590 - RNA, 19 nt, synthetic construct
  misc_feature 1..19: note = siRNA sense sequence
  source 1..19: mol_type = other RNA
tgaatgtcctatgtatggc

SEQ ID NO: 69591 - RNA, 19 nt, synthetic construct
  misc_feature 1..19: note = siRNA antisense sequence
  source 1..19: mol_type = other RNA
gccatacataggacattca

SEQ ID NO: 69592 - RNA, 19 nt, synthetic construct
  misc_feature 1..19: note = siRNA sense sequence
  source 1..19: mol_type = other RNA
gaatgtcctatgtatggca

SEQ ID NO: 69593 - RNA, 19 nt, synthetic construct
  misc_feature 1..19: note = siRNA antisense sequence
  source 1..19: mol_type = other RNA
tgccatacataggacattc

SEQ ID NO: 69594 - RNA, 19 nt, synthetic construct
  misc_feature 1..19: note = siRNA sense sequence
  source 1..19: mol_type = other RNA
aatgtcctatgtatggcat

SEQ ID NO: 69595 - RNA, 19 nt, synthetic construct
  misc_feature 1..19: note = siRNA antisense sequence
  source 1..19: mol_type = other RNA
atgccatacataggacatt

SEQ ID NO: 69596 - RNA, 19 nt, synthetic construct
  misc_feature 1..19: note = siRNA sense sequence
  source 1..19: mol_type = other RNA
atgtatggcatatcctgta

SEQ ID NO: 69597 - RNA, 19 nt, synthetic construct
  misc_feature 1..19: note = siRNA antisense sequence
  source 1..19: mol_type = other RNA
tacaggatatgccatacat

SEQ ID NO: 69598 - RNA, 19 nt, synthetic construct
  misc_feature 1..19: note = siRNA sense sequence
  source 1..19: mol_type = other RNA
tgtatggcatatcctgtac

SEQ ID NO: 69599 - RNA, 19 nt, synthetic construct
  misc_feature 1..19: note = siRNA antisense sequence
  source 1..19: mol_type = other RNA
gtacaggatatgccataca

SEQ ID NO: 69600 - RNA, 19 nt, synthetic construct
  misc_feature 1..19: note = siRNA sense sequence
  source 1..19: mol_type = other RNA
tggcatatcctgtacacca

SEQ ID NO: 69601 - RNA, 19 nt, synthetic construct
  misc_feature 1..19: note = siRNA antisense sequence
  source 1..19: mol_type = other RNA
tggtgtacaggatatgcca

SEQ ID NO: 69602 - RNA, 19 nt, synthetic construct
  misc_feature 1..19: note = siRNA sense sequence
  source 1..19: mol_type = other RNA
ggcatatcctgtacaccaa

SEQ ID NO: 69603 - RNA, 19 nt, synthetic construct
  misc_feature 1..19: note = siRNA antisense sequence
  source 1..19: mol_type = other RNA
ttggtgtacaggatatgcc

SEQ ID NO: 69604 - RNA, 19 nt, synthetic construct
  misc_feature 1..19: note = siRNA sense sequence
  source 1..19: mol_type = other RNA
gcatatcctgtacaccaat

SEQ ID NO: 69605 - RNA, 19 nt, synthetic construct
  misc_feature 1..19: note = siRNA antisense sequence
  source 1..19: mol_type = other RNA
attggtgtacaggatatgc

SEQ ID NO: 69606 - RNA, 19 nt, synthetic construct
  misc_feature 1..19: note = siRNA sense sequence
  source 1..19: mol_type = other RNA
catatcctgtacaccaatt

SEQ ID NO: 69607 - RNA, 19 nt, synthetic construct
  misc_feature 1..19: note = siRNA antisense sequence
  source 1..19: mol_type = other RNA
aattggtgtacaggatatg

SEQ ID NO: 69608 - RNA, 19 nt, synthetic construct
  misc_feature 1..19: note = siRNA sense sequence
  source 1..19: mol_type = other RNA
atatcctgtacaccaattg

SEQ ID NO: 69609 - RNA, 19 nt, synthetic construct
  misc_feature 1..19: note = siRNA antisense sequence
  source 1..19: mol_type = other RNA
caattggtgtacaggatat

SEQ ID NO: 69610 - RNA, 19 nt, synthetic construct
  misc_feature 1..19: note = siRNA sense sequence
  source 1..19: mol_type = other RNA
tatcctgtacaccaattga

SEQ ID NO: 69611 - RNA, 19 nt, synthetic construct
  misc_feature 1..19: note = siRNA antisense sequence
  source 1..19: mol_type = other RNA
tcaattggtgtacaggata

SEQ ID NO: 69612 - RNA, 19 nt, synthetic construct
  misc_feature 1..19: note = siRNA sense sequence
  source 1..19: mol_type = other RNA
atcctgtacaccaattgaa

SEQ ID NO: 69613 - RNA, 19 nt, synthetic construct
  misc_feature 1..19: note = siRNA antisense sequence
  source 1..19: mol_type = other RNA
ttcaattggtgtacaggat

SEQ ID NO: 69614 - RNA, 19 nt, synthetic construct
  misc_feature 1..19: note = siRNA sense sequence
  source 1..19: mol_type = other RNA
tcctgtacaccaattgaag

SEQ ID NO: 69615 - RNA, 19 nt, synthetic construct
  misc_feature 1..19: note = siRNA antisense sequence
  source 1..19: mol_type = other RNA
cttcaattggtgtacagga

SEQ ID NO: 69616 - RNA, 19 nt, synthetic construct
  misc_feature 1..19: note = siRNA sense sequence
  source 1..19: mol_type = other RNA
gaaggtcagagctttggta

SEQ ID NO: 69617 - RNA, 19 nt, synthetic construct
  misc_feature 1..19: note = siRNA antisense sequence
  source 1..19: mol_type = other RNA
taccaaagctctgaccttc

SEQ ID NO: 69618 - RNA, 19 nt, synthetic construct
  misc_feature 1..19: note = siRNA sense sequence
  source 1..19: mol_type = other RNA
aaggtcagagctttggtat

SEQ ID NO: 69619 - RNA, 19 nt, synthetic construct
  misc_feature 1..19: note = siRNA antisense sequence
  source 1..19: mol_type = other RNA
ataccaaagctctgacctt

SEQ ID NO: 69620 - RNA, 19 nt, synthetic construct
  misc_feature 1..19: note = siRNA sense sequence
  source 1..19: mol_type = other RNA
aggtcagagctttggtatt

SEQ ID NO: 69621 - RNA, 19 nt, synthetic construct
  misc_feature 1..19: note = siRNA antisense sequence
  source 1..19: mol_type = other RNA
aataccaaagctctgacct

SEQ ID NO: 69622 - RNA, 19 nt, synthetic construct
  misc_feature 1..19: note = siRNA sense sequence
  source 1..19: mol_type = other RNA
ggtcagagctttggtattt

SEQ ID NO: 69623 - RNA, 19 nt, synthetic construct
  misc_feature 1..19: note = siRNA antisense sequence
  source 1..19: mol_type = other RNA
aaataccaaagctctgacc

SEQ ID NO: 69624 - RNA, 19 nt, synthetic construct
  misc_feature 1..19: note = siRNA sense sequence
  source 1..19: mol_type = other RNA
gtcagagctttggtatttt

SEQ ID NO: 69625 - RNA, 19 nt, synthetic construct
  misc_feature 1..19: note = siRNA antisense sequence
  source 1..19: mol_type = other RNA
aaaataccaaagctctgac

SEQ ID NO: 69626 - RNA, 19 nt, synthetic construct
  misc_feature 1..19: note = siRNA sense sequence
  source 1..19: mol_type = other RNA
tatctggtgcatcagctgt

SEQ ID NO: 69627 - RNA, 19 nt, synthetic construct
  misc_feature 1..19: note = siRNA antisense sequence
  source 1..19: mol_type = other RNA
acagctgatgcaccagata

SEQ ID NO: 69628 - RNA, 19 nt, synthetic construct
  misc_feature 1..19: note = siRNA sense sequence
  source 1..19: mol_type = other RNA
atctggtgcatcagctgtg

SEQ ID NO: 69629 - RNA, 19 nt, synthetic construct
  misc_feature 1..19: note = siRNA antisense sequence
  source 1..19: mol_type = other RNA
cacagctgatgcaccagat

SEQ ID NO: 69630 - RNA, 19 nt, synthetic construct
  misc_feature 1..19: note = siRNA sense sequence
  source 1..19: mol_type = other RNA
tctggtgcatcagctgtgt

SEQ ID NO: 69631 - RNA, 19 nt, synthetic construct
  misc_feature 1..19: note = siRNA antisense sequence
  source 1..19: mol_type = other RNA
acacagctgatgcaccaga

SEQ ID NO: 69632 - RNA, 19 nt, synthetic construct
  misc_feature 1..19: note = siRNA sense sequence
  source 1..19: mol_type = other RNA
ctggtgcatcagctgtgta

SEQ ID NO: 69633 - RNA, 19 nt, synthetic construct
  misc_feature 1..19: note = siRNA antisense sequence
  source 1..19: mol_type = other RNA
tacacagctgatgcaccag

SEQ ID NO: 69634 - RNA, 19 nt, synthetic construct
  misc_feature 1..19: note = siRNA sense sequence
  source 1..19: mol_type = other RNA
tggtgcatcagctgtgtat

SEQ ID NO: 69635 - RNA, 19 nt, synthetic construct
  misc_feature 1..19: note = siRNA antisense sequence
  source 1..19: mol_type = other RNA
atacacagctgatgcacca

SEQ ID NO: 69636 - RNA, 19 nt, synthetic construct
  misc_feature 1..19: note = siRNA sense sequence
  source 1..19: mol_type = other RNA
ggtgcatcagctgtgtatt

SEQ ID NO: 69637 - RNA, 19 nt, synthetic construct
  misc_feature 1..19: note = siRNA antisense sequence
  source 1..19: mol_type = other RNA
aatacacagctgatgcacc

SEQ ID NO: 69638 - RNA, 19 nt, synthetic construct
  misc_feature 1..19: note = siRNA sense sequence
  source 1..19: mol_type = other RNA
gtgcatcagctgtgtattt

SEQ ID NO: 69639 - RNA, 19 nt, synthetic construct
  misc_feature 1..19: note = siRNA antisense sequence
  source 1..19: mol_type = other RNA
aaatacacagctgatgcac

SEQ ID NO: 69640 - RNA, 19 nt, synthetic construct
  misc_feature 1..19: note = siRNA sense sequence
  source 1..19: mol_type = other RNA
gcatcagctgtgtatttta

SEQ ID NO: 69641 - RNA, 19 nt, synthetic construct
  misc_feature 1..19: note = siRNA antisense sequence
  source 1..19: mol_type = other RNA
taaaatacacagctgatgc

SEQ ID NO: 69642 - RNA, 19 nt, synthetic construct
  misc_feature 1..19: note = siRNA sense sequence
  source 1..19: mol_type = other RNA
catcagctgtgtattttac

SEQ ID NO: 69643 - RNA, 19 nt, synthetic construct
  misc_feature 1..19: note = siRNA antisense sequence
  source 1..19: mol_type = other RNA
gtaaaatacacagctgatg

SEQ ID NO: 69644 - RNA, 19 nt, synthetic construct
  misc_feature 1..19: note = siRNA sense sequence
  source 1..19: mol_type = other RNA
atcagctgtgtattttacg

SEQ ID NO: 69645 - RNA, 19 nt, synthetic construct
  misc_feature 1..19: note = siRNA antisense sequence
  source 1..19: mol_type = other RNA
cgtaaaatacacagctgat

SEQ ID NO: 69646 - RNA, 19 nt, synthetic construct
  misc_feature 1..19: note = siRNA sense sequence
  source 1..19: mol_type = other RNA
tcagctgtgtattttacgt

SEQ ID NO: 69647 - RNA, 19 nt, synthetic construct
  misc_feature 1..19: note = siRNA antisense sequence
  source 1..19: mol_type = other RNA
acgtaaaatacacagctga

SEQ ID NO: 69648 - RNA, 19 nt, synthetic construct
  misc_feature 1..19: note = siRNA sense sequence
  source 1..19: mol_type = other RNA
cagctgtgtattttacgtc

SEQ ID NO: 69649 - RNA, 19 nt, synthetic construct
  misc_feature 1..19: note = siRNA antisense sequence
  source 1..19: mol_type = other RNA
gacgtaaaatacacagctg

SEQ ID NO: 69650 - RNA, 19 nt, synthetic construct
  misc_feature 1..19: note = siRNA sense sequence
  source 1..19: mol_type = other RNA
agctgtgtattttacgtca

SEQ ID NO: 69651 - RNA, 19 nt, synthetic construct
  misc_feature 1..19: note = siRNA antisense sequence
  source 1..19: mol_type = other RNA
tgacgtaaaatacacagct

SEQ ID NO: 69652 - RNA, 19 nt, synthetic construct
  misc_feature 1..19: note = siRNA sense sequence
  source 1..19: mol_type = other RNA
gctgtgtattttacgtcaa

SEQ ID NO: 69653 - RNA, 19 nt, synthetic construct
  misc_feature 1..19: note = siRNA antisense sequence
  source 1..19: mol_type = other RNA
ttgacgtaaaatacacagc

SEQ ID NO: 69654 - RNA, 19 nt, synthetic construct
  misc_feature 1..19: note = siRNA sense sequence
  source 1..19: mol_type = other RNA
ctgtgtattttacgtcaag

SEQ ID NO: 69655 - RNA, 19 nt, synthetic construct
  misc_feature 1..19: note = siRNA antisense sequence
  source 1..19: mol_type = other RNA
cttgacgtaaaatacacag

SEQ ID NO: 69656 - RNA, 19 nt, synthetic construct
  misc_feature 1..19: note = siRNA sense sequence
  source 1..19: mol_type = other RNA
tgtgtattttacgtcaagg

SEQ ID NO: 69657 - RNA, 19 nt, synthetic construct
  misc_feature 1..19: note = siRNA antisense sequence
  source 1..19: mol_type = other RNA
ccttgacgtaaaatacaca

SEQ ID NO: 69658 - RNA, 19 nt, synthetic construct
  misc_feature 1..19: note = siRNA sense sequence
  source 1..19: mol_type = other RNA
gtgtattttacgtcaaggt

SEQ ID NO: 69659 - RNA, 19 nt, synthetic construct
  misc_feature 1..19: note = siRNA antisense sequence
  source 1..19: mol_type = other RNA
accttgacgtaaaatacac

SEQ ID NO: 69660 - RNA, 19 nt, synthetic construct
  misc_feature 1..19: note = siRNA sense sequence
  source 1..19: mol_type = other RNA
tgtattttacgtcaaggta

SEQ ID NO: 69661 - RNA, 19 nt, synthetic construct
  misc_feature 1..19: note = siRNA antisense sequence
  source 1..19: mol_type = other RNA
taccttgacgtaaaataca

SEQ ID NO: 69662 - RNA, 19 nt, synthetic construct
  misc_feature 1..19: note = siRNA sense sequence
  source 1..19: mol_type = other RNA
gtcaaggtaaatgagcatc

SEQ ID NO: 69663 - RNA, 19 nt, synthetic construct
  misc_feature 1..19: note = siRNA antisense sequence
  source 1..19: mol_type = other RNA
gatgctcatttaccttgac

SEQ ID NO: 69664 - RNA, 19 nt, synthetic construct
  misc_feature 1..19: note = siRNA sense sequence
  source 1..19: mol_type = other RNA
tcaaggtaaatgagcatcc

SEQ ID NO: 69665 - RNA, 19 nt, synthetic construct
  misc_feature 1..19: note = siRNA antisense sequence
  source 1..19: mol_type = other RNA
ggatgctcatttaccttga

SEQ ID NO: 69666 - RNA, 19 nt, synthetic construct
  misc_feature 1..19: note = siRNA sense sequence
  source 1..19: mol_type = other RNA
aaggtaaatgagcatcctg

SEQ ID NO: 69667 - RNA, 19 nt, synthetic construct
  misc_feature 1..19: note = siRNA antisense sequence
  source 1..19: mol_type = other RNA
caggatgctcatttacctt

SEQ ID NO: 69668 - RNA, 19 nt, synthetic construct
  misc_feature 1..19: note = siRNA sense sequence
  source 1..19: mol_type = other RNA
aggtaaatgagcatcctgt

SEQ ID NO: 69669 - RNA, 19 nt, synthetic construct
  misc_feature 1..19: note = siRNA antisense sequence
  source 1..19: mol_type = other RNA
acaggatgctcatttacct

SEQ ID NO: 69670 - RNA, 19 nt, synthetic construct
  misc_feature 1..19: note = siRNA sense sequence
  source 1..19: mol_type = other RNA
ggtaaatgagcatcctgtt

SEQ ID NO: 69671 - RNA, 19 nt, synthetic construct
  misc_feature 1..19: note = siRNA antisense sequence
  source 1..19: mol_type = other RNA
aacaggatgctcatttacc

SEQ ID NO: 69672 - RNA, 19 nt, synthetic construct
  misc_feature 1..19: note = siRNA sense sequence
  source 1..19: mol_type = other RNA
gtaaatgagcatcctgttt

SEQ ID NO: 69673 - RNA, 19 nt, synthetic construct
  misc_feature 1..19: note = siRNA antisense sequence
  source 1..19: mol_type = other RNA
aaacaggatgctcatttac

SEQ ID NO: 69674 - RNA, 19 nt, synthetic construct
  misc_feature 1..19: note = siRNA sense sequence
  source 1..19: mol_type = other RNA
taaatgagcatcctgtttt

SEQ ID NO: 69675 - RNA, 19 nt, synthetic construct
  misc_feature 1..19: note = siRNA antisense sequence
  source 1..19: mol_type = other RNA
aaaacaggatgctcattta

SEQ ID NO: 69676 - RNA, 19 nt, synthetic construct
  misc_feature 1..19: note = siRNA sense sequence
  source 1..19: mol_type = other RNA
aaatgagcatcctgtttta

SEQ ID NO: 69677 - RNA, 19 nt, synthetic construct
  misc_feature 1..19: note = siRNA antisense sequence
  source 1..19: mol_type = other RNA
taaaacaggatgctcattt
